United States Patent Application Publication US 2026/0022370 A1 - sequence listing, part 9

SEQ ID NO: 49194 - DNA, 525 bp, Mus musculus
  source 1..525: mol_type = other DNA
gaggaaaagataaagttgtgtgtaagtgactgtcactggtggtgcctgacacagttatattcatgcagagaaattaaattacgtggaaatgagcctatttataaaccatgaaagaaacaggttcttgaaaagaatccacagcgcatttctgtgttgctatttttctccatatacagaggaatgcacgggcataatttaacatacaaatgcctctctgtatacattatataacccgagaggagtgcttgcaacaataacgggccctttttgggtgggacctgcagcgcgcatgcctggccagctacaggtgcatcacctgagcggctcccacgcgccgccgccggtcgcggctcgacgagcgcgcgcgcgcccgcccgcccgctcgctcgcccaagcacggcgccgcggccgcggggagggcgcgcgccagacagacggagacagctgctgtctgtcagcgcggcggggcccgcgagctctcgcgagagctgcccgggccggccgcgagaagtggggggagcgcag

SEQ ID NO: 49195 - DNA, 358 bp, Mus musculus
  source 1..358: mol_type = other DNA
ttttatactaagttgcagttaaatcccaaatcaaatgctaatttgtaatttcactaattatctcctggagttcacttcttgtagctaaaacaaagtctttagagtgcactgtgtaagtgggctgaatcagggccctgaggagtaaatttcccaagaaaaccattacttttaaatcaattaagtgctttaggaataggacagaaactaagaaggaactgtcattttgacatttttaaatgtttgacagctccacggggtgacggcgcgtctccgaagcgcgcttccgtcccctcgccccggctcgctgtggccctgccaggccgccgtagccggcctcgcgcattcccaggcgaggagc

SEQ ID NO: 49196 - DNA, 670 bp, Mus musculus
  source 1..670: mol_type = other DNA
atgtattccttttaaaaggagcactgagcagtgttccatgcattgaacctcactttgatgtttattgctcacttcatgtgtgcagtgaaccaggtacaagcttagaaataaccgtttgtgttcaactcttgagagtgaacagtgtttaaaagtgttactttttttttttgggtaaattcctaaatacatcttaacctaaagtttcaggaagagtctttaatctcgttcttggagaagatgatttgactgatcattgatctgcatatattatctaatggactgttacatatttgtaaaaacaatttttggtaaaatatgatgacgatggatttcacaaatagataaaagaagaaaactaccttctgatcttgtattttgaagattgatgtttgcattttatttcagtaaacaattgctaaagacatctcaataggacatatgcaatgtttttattacatacttctattgaacattacagaattctttgggttatttgtaaattaatgaatagatttgaatacttatgacccaatacttgttataacatagaggattttgttttactccaaataaggaatgaatttgcatttaaaatcttaatgaatgttttcaaaatgagtagatgacatagtatgctaactaacgtctccaagttatgtattcataatac

SEQ ID NO: 49197 - DNA, 406 bp, Mus musculus
  source 1..406: mol_type = other DNA
ttaaatctaattattgtattttataacctttttttaagactttgtctttggtagtctcctaataatataatagaaccaacttctttagtacattgtaatttcttggagaaaagttgaaacttttctaaatgaacagaatttaaaatgtaacaaaactgttttttttttttttttttttttttttgtaggttggaaatcaacaaggtacttggccaaaaagtcctgtactttgggatccatcgtgtgcacggggcagacccctgcaaacactgctggccgtcttctctcagaggacaaggcctgggagcccgcggccactccatcctggtgaagtaaacggcgcttgtgcttattcacttggtcaatcctcgatccactccgggccgcaccgcgagactcgcactca

SEQ ID NO: 49198 - DNA, 485 bp, Mus musculus
  source 1..485: mol_type = other DNA
atgatgcgccacaaaaactgatatcttaggaatatctgagtattattagcacacacacaaagaatatgtttgaagaatttgtaaatctcttagaattcaggattttcagagtaatgaaactgttcagtatgatatataatagttagggtatatttgtcagaacttgaactccaatgcaatctattatggattctaagtgattgacaatgtcaaatgggtttaacatttgtcacaaatgctcagaagcaagactgtcttttttaaagctgattttatatatgtatatgtggtctttgtatatgtatatggtaattcattacctcattaatgatttcgaactccaccctccgcagtgacgatgcataggaaaatccaatcaagtgggacgattttttttttttttacctagggacacctccggagccgggcggcggatgggacgccggcggagccagagagcatgcgcgtccgcgccgagcatgctc

SEQ ID NO: 49199 - DNA, 488 bp, Mus musculus
  source 1..488: mol_type = other DNA
atttgtaaactataaacaatttacatcctttcgaatatctaggttttcatattaataaaatgtgattatttgaaaatgttgacttcagtatggaaataacaatgctgagtgttttgcaaaattgataaaaacacagattacatttctgaaagtgttaaaagtaacttctttgtgaccggctcttaaaagtcatgtaggaattattaatcattttaactttttatgatgcaggtagtgccaaaatatctctgcgacttaattatatttatcagtgttgtaacaaccatttttgcgttgataatgataatgaggatgaagaccaccatcgagctttcgaaacacgcgtttttagaagagtttcaaagttactctgcggctgactccaaggggccagagcgtcactcccccccttcgcccccgcccccaggcaatgggggcggggtggcaggaagaagcgccttgacgtcacttccaggtgccttttgcgg

SEQ ID NO: 49200 - DNA, 464 bp, Mus musculus
  source 1..464: mol_type = other DNA
ctatttgagaggatctcaactttactgataactggtgataggaactaacagtctataataacatcatatttgtgacaaacctgtcttgatcaggagacactgtcatgtaatggttggatgtaatatgttacttccatcagtgaaatggctattgctatgatcaagttttaacatactctttgtgaaatatattactggttgggatttttttttcaaaaacattttacatccttatactgtggtaaagcattgcttttttacttgcttgttgaagcatataaatacagttaattttcaaaactatatagtactttgtactttttattggaaaattttaaattccaattttatttattttatatcacacaagtaaagggactgcctcagtggatatcaaccaaggatgcacagacagagcatgtcacagacagagcatgtcacagacagagcatgtcacagacaga

SEQ ID NO: 49201 - DNA, 524 bp, Mus musculus
  source 1..524: mol_type = other DNA
atgcaatttgttacttacttgtatgtattttaaattcctcaaatacctgtttaccaaactgtttttaaaagccattttcagaatgtcatggtaagatttctagtctgaaatcaaagaatttaagcatgcattgtgttttcgtcctgcagtcttaaataacattgaagaatatcaccaaattgactgaaattttataacaactttaaaatggaaaagtatatacctcagttgtatacctggaaataaatattctctaccaaattgtgatattatgtaatatatgtaatatatatatatatatatatatatatatatatatatatatatatatatatatgtatatattttttccagactagccactttctgggtgcaaaaatataattttattcaagccattgggaaataaatgttttaaaagccatactttcggaacgctagagctcgcgggggctcaaaaaacattaaataatcaatttaaaataagcttctatgtttaatacccacgttttcaacgcttgccc

SEQ ID NO: 49202 - DNA, 654 bp, Mus musculus
  source 1..654: mol_type = other DNA
tatctaatacattcattttatgaatgaaatgatcaggcatttggaatgccataaataaataagttcttataatcacactgttagagaactaaagaagtaaactttgtgaatcctcagaaagattttaaaatgtataagattagaagaaacaaatatttttaaaatatgaactacttaggagcttgtattcttctcagctaatacaattaaaatcaaaatgctgcagttattacataagtaactagattcactttgatgtgtaaatataatttcatacgtaggtgtgtgacatgcagcttataaagcagtctaaataatcttatttatttaaataccttttaaaataattgcacttccattgtaaacaaaattttagcttcattataaaatattttctctagtggggaaaataatcaggcttttgatttatttttaaatggtgaatgaaaaagccatgttcttcagagaagcaatttgtgtcacattttaaatttaattagtgcccaatttcaactcacgctgtgcaagaaacaatttcagcattatattattcatggttcgttcataacaaaacacattattaagcatttatttccatcaaaattcatttgctctctatttgataaaaaataaataaataaataaataatacac

SEQ ID NO: 49203 - DNA, 377 bp, Mus musculus
  source 1..377: mol_type = other DNA
aaattaaaattaactggccattgtgaaggctgcaggccttaaattcttaaaacgtaaacttactatagagttgatcagcagttcatcaggtgagtcctcaagtaaagtattagaaaaagtgattctttaaaaaaaaatctttatctaggttccctgactcttccaaagggcagaagcatttgggcaaacggctaccggtaagagtcatctgtccctgatccactgtcaagacgagtgcacacctccagagcccagggacgccttcgccctcggctgcctgctgcagcttggctcgcaccagcggcgcgacaataaacaagtgccgcggaccgggccctgcacccctcagatcccatgagagaagacgtgactttttc

SEQ ID NO: 49204 - DNA, 474 bp, Mus musculus
  source 1..474: mol_type = other DNA
cggcgactgcgcgccgccgccgattgttcccggcttaggcctcgggccgcgtgcggcgagcgccctgtccgcccccctccctcccccggagcctggccggggggcgcgcgggacacaaaggacggccggcgtgtccggagcctcgccacgctcgggcctccgcgccgccgctcgccgcgcagccgcccagaaacgggcgggggttgggggggggggggagtctccgcgtccggcgcagcgcggcccggctctgacctgccgccccctggcggccgcgcggggaacccacaagggccgcctgcccccttgtgcgacatgtgctgccggcccgggctccatgagcgtggcgggtacttggcaggatcccgtgttcccgtccggtttcccgcggcttgagctggacagtagagttcagattaattcgtgcttttggcaaatggatagaaagtaattttgagcaaatgtgcttaccct

SEQ ID NO: 49205 - DNA, 456 bp, Mus musculus
  source 1..456: mol_type = other DNA
aagcctactgtaaaagccaacattttaatgacctttttgtctaattatttatttcaaatttagcaggaataaagtgattacagtgcaatgtgtgcatctactgcagtgagggcacttgtagcattatgctgacagctgcctcggtgggagccacagtgggcgctgcctcgggcggcactggctgcgtccagtcgtcggtcagtcggtcgcggggaagatagtgaagtagactagcatctactgccctaagtgctccttctggcataagaagttatgtagttttgcatagttgcactacaagaagaatgtagttgtgcaaatctatgcacagcttctgtagcactaaagtgcttatagtgcactactgcattacgagcacttaaagtactgccagctgtagaactctggccatcgcccagccaactttgcatccagctgtataatattctgctgtgc

SEQ ID NO: 49206 - DNA, 469 bp, Mus musculus
  source 1..469: mol_type = other DNA
ttcatctcgagtcttggcaagggtgcagcttaagatgaaattctcttaaagtggttaagatatttagagtccttttgtcttagttactctctgagaaatattaaaaacaaattgtcaaaggtgtcaaagctcagaaaggtataagaccaacgtgaactatgatgttagaataaactgaacttcctaaattctttcagaagaatcatgttacagaaaaatcctcctagcataccctgcttttgccattcgcacttgccaaggtccagttcatgaaatttggatacagattcctatgcatagaggaccttgatttgtagagaaatgtttcatctggttgaatgctttccgaaatcaacccggaggaagaaggctagtttccttcagcccggcgcttgctgtgctccgcaggatctgggcttgggcggagccggcggacgcggggttggcgaaccgggctctggagctccgc

SEQ ID NO: 49207 - DNA, 214 bp, Mus musculus
  source 1..214: mol_type = other DNA
gacttctcaggaactgggagaccagttcccatttcacagacttctgagaacttgtgtgtgtgtgtgtgtgtgtgagagagagagagagagacctatggccctctatctgttcttaggataccacctagagaggtggctttggcaagaattggaaatgcaatattctttatctccagaaaaatatagcgtgataacatttactccggccgactct

SEQ ID NO: 49208 - DNA, 432 bp, Mus musculus
  source 1..432: mol_type = other DNA
taccacctagagaggtggctttggcaagaattggaaatgcaatattctttatctccagaaaaatatagcgtgataacatttactccggccgactctcctcagtctatgtgaagctgaggccggcctgtccatctccctcggggtggggggagccggcgcgcggtcccaccttcgtcgcgcacactggataggcgagctcgcagcgctccacgactctgcggctcggaactcggaccgcagggctgaacacccctactgtggtgtttaaaaaaaaaaaaagacatttctttgccttttcctcttttcgagtggctagcggagccggcagccttcccaaggcagccctggttggcttgccatccgctgagtgcagtccagaggtctgcgcggctcgtcccctcggctggcggaagggggtgacgctgggcagcg

SEQ ID NO: 49209 - DNA, 482 bp, Mus musculus
  source 1..482: mol_type = other DNA
aacacatagtgtgttatggttggagttctctaagtttcaaaatctttctgtagaatttgcttaagtaaaaacaaaacacacgtgattctagatctatcgatatttggaaaagaagataggttcagctacatttaatagaacaagtctggatttgttttctatttacaaagtcagcaaatattgcaacagtaatacaatactaattactacaaatttaatgcactacaaatactaatacaacactacaaatactagtactatactacagtcactacagtagaagaatttcatcttttaaaataacacacagattgcataataaaacaatagttgtatagggctaagtacaagaatagtcctagaggctgccttaactgagttgtagagccacagcaccaagtatgatggtgctgctccacctcccagtataagctgtgagtcatctggcaacagtaaacggttcctgaatgcacaatgagcag

SEQ ID NO: 49210 - DNA, 440 bp, Mus musculus
  source 1..440: mol_type = other DNA
tttagcagacaggcacacacacctggctgctgtgtacgtttctttcctttgaaactaacaaggcacttgacattcacgttcaaggcactcttagactccaactggaacaattctaaaccacgacagtcctgttcgcaccaggcaaatggccgccacggtccatctgcacagcccgtggtacctagaggattaaagcttgatatgaagatttccttgcaagtccagtttgtccaattgcagagaaatgacaactgtgaataattggtagcaggaggatgcctaattgtgcaacaaaacagctccttgtactttaaataaacgtttctaggtctataaagggcctttgacggaatgctccctctctgggacacatgaaagaggctcaaagaggatttctctgccccccgtgccccaccagggccccgtggcttggcgagcca

SEQ ID NO: 49211 - DNA, 379 bp, Mus musculus
  source 1..379: mol_type = other DNA
ttttttttttttttttgatgcctcggtacataaaaaattaatatgacttctaatcactcccacttggtagagcctccgaattcatagaaagcagcagactataatattttgttgatgaactctgcaaaacttacttatcatgatttgtgacagtatttacaacagtgaaacataattttgcaatgcaactttccatttccattgtctatgagcatagctgaagttcaaaaatgaaggcatcgattcataactgtgacacttgcttagaaaatattccagaccctagtaccaatgaccctaatttctagagagtgcgcgcctgcgcagtgccactgccggctccgccccggagaacccggaagcctgtgaagctgcttcc

SEQ ID NO: 49212 - DNA, 315 bp, Mus musculus
  source 1..315: mol_type = other DNA
tggctgctgccaggaaataccaacaagacgatcatttgaaatatttgaacccatattccaaaaagcgtttgtgtacaagtattctgtaactcagaagtcagaggtagactcgttctcagctgtctagccaactggataatcagttatgtatcctctttcaatgacaggcgcgcgcacgagcgcgtgcgcagtggcgtaacgcggtcagtatccgtaaacagcatccctggatggctggggagcgccgggacccgcactgctgcacgtcccgcccaccacggcccgcgccttattggccgtctcccgccccgccct

SEQ ID NO: 49213 - DNA, 111 bp, Mus musculus
  source 1..111: mol_type = other DNA
aagggcagcaggttccccgtagtcagtttcccccataaatgacttaagtcagctctcactgagactagagtgaggctggcagccagccacttttattgtaagactgggtct

SEQ ID NO: 49214 - DNA, 578 bp, Mus musculus
  source 1..578: mol_type = other DNA
cgagcagagactcggggaccaggccgccgcccgcgcccgcgtgcagcccggctcccgccttgagcgccgggtgctcggcgtccgccacgctgcccaggccgtagggcacggggaaggcatgtgcatgtcgcaggcgcttcgcctcgtcgatgaacggccgcttctccgactcggtgagcagcttccactcggcgcccaggcgcttgctgatctccgagttcacaccatgaaggcgttcatgggccgcttgacgtggtccacaggcttggacatgctgtcgccgtgccgcggctgcagcccgccgccgccgccaccggggccctcggcctccgcccggaggaaatcaatgttggctgccagagggaaccggctcagcgggcggccgtgcgtccccgcgtcgttcccgcgcgggaagagaggaccagacgaccagccctgggtcggggcgctgcgtcccggaccgctttggtctgtgtcgagctctaactccctgcaggtggccgagcccgccgccgcgtgctgccaagtgccaaagggggctctcggcccggtgactttctcatttgacagaagcagat

SEQ ID NO: 49215 - DNA, 382 bp, Mus musculus
  source 1..382: mol_type = other DNA
cattttaaaaaaagtccccaggaatttgattgtgtatagcgtcaattataatagctctataaaaactgtcagagtagaacatttttaaaatttttatttagagaaatgatttatgcttttcgttgagagactgcaacaactgtttaaaaaagctgtgtattcagactaggctcattccttttccaaaggcttgccaaaaatgttgaggcgtctgttgcgagtcacaccggaacagtctcaaacactttcaaagcagcgctgggcagaacaggggagccgccggcgacaccaagctccaaacagtgcgcagactccgcggcgcgcggcggacactccactaggggggacgggaggaggctccgctggtccctcctccctcctg

SEQ ID NO: 49216 - DNA, 559 bp, Mus musculus
  source 1..559: mol_type = other DNA
acaactgtttaaaaaagctgtgtattcagactaggctcattccttttccaaaggcttgccaaaaatgttgaggcgtctgttgcgagtcacaccggaacagtctcaaacactttcaaagcagcgctgggcagaacaggggagccgccggcgacaccaagctccaaacagtgcgcagactccgcggcgcgcggcggacactccactaggggggacgggaggaggctccgctggtccctcctccctcctgacggccgcggctggacatgcacacccagcgcccgctgccggcgccaacactcgcaggtggcgacactcacctgagccgggctgcagtcgcctcggaagcggcggaggggcccggagctgggaaagcaggagcagccccagagcagacctgcgatctgaggtgatatagcacgttcctccaggacctggatccctgcatccttccagcctgcggcgcccggagtagccgggacccaggggctcgcgggcgcggcacccacgcgggcgcacgctcggaggcgcgctcaccgagaggggcgcggctgagcccggg

SEQ ID NO: 49217 - DNA, 393 bp, Mus musculus
  source 1..393: mol_type = other DNA
agcaagtatatttccccacattttgaagtaatttcgttaagacatgatttccaagtactccagaagcaggagttactgtgagaccttgtctcaaaagaaattctgtaatacaagcttatttttctagcaaatggacaccattacaagaagctacaactgtacctttggaatgccagtgaaattcagatttctacttaggataaggaagctgcttccagaaattctcagcaatttgatatcgtaaacctaagagtgggggagccagccttccctaagcatcagctctaaaaacatacatatgtatatgatcaacattatacaacagcaggttacatgtctatattaaatgtatgcacacatgtgataattataattaaagcaaactatagagat

SEQ ID NO: 49218 - DNA, 310 bp, Mus musculus
  source 1..310: mol_type = other DNA
ccgcctgtactcccagctcggggaaggcaggagcaggtggattagggctccctggtaatacacaataacaatttatttacctaaacgttagaaatagacattcttgggcaaactgtacgtgaagatgtcacgtaggcagtctgactaataaacaggcctgagccaagccagaacctgcctcagatgagtcagaggtgagggccggggttcctggcacactctgtgtgacctctgtccacagtcatattgtaactccagagtcaaggatcattcagagcatagaatgtcatcactggccattgtgtccctt

SEQ ID NO: 49219 - DNA, 456 bp, Mus musculus
  source 1..456: mol_type = other DNA
cttgtctagtcaccttaagatctcggacaagctagatcttttgagtctgaatttattcagtaaaatagtaataaccatttcgaaaagtaaattgtcctgtaacatcggttccctttgccacggatcctctgggagcctctcagggctccgtgaaagaaacctgacggtcttcacggctttaaggtctgcaaaggcaatctgagcatgggggaccgcaggcaaagccaggcggcgtttccgagcgcgggggcgggcacagccggtaccgcccccgccaccttcagggtggacttcggcaaagtttgcaacggcgcccggctccgcgttccccgagccgcccccggtcacctgcgcgcggttggtctcacgcttctcccaggctcgaggaggcggcggcgacagcgcgtagcgggcgccccgaggagccccgagaggcggggtcagggcgggccggcg

SEQ ID NO: 49220 - DNA, 405 bp, Mus musculus
  source 1..405: mol_type = other DNA
gagatattttaaaagtaaagattttttcaaaagtccaaaagataattttcccaaatttataaaattaaaaacaaattgaacaacttctcatttataatgacaaatatgaatcagtggacataatacaatctctgaaactgtaatcaagttggctagaatgttaaaattcaactcactcattatgatgactggatgagtgcgtaatccagaatcatctaggaagatgtgtttccagcacactggcgggacccctctctaggggccacaagagaaaattcacagtcatgtttgagtggctgtcagatgattgagagcctttaaatgttactgtataatctgtactttgtaatatttgatcattgcatggttcgctaactttcaagctaacaggaaattaagcattat

SEQ ID NO: 49221 - DNA, 207 bp, Mus musculus
  source 1..207: mol_type = other DNA
gtcaaaaaagaaaaaaaatatatatatatatatcccactgactcatttcagtttggaagggcattccttacattacaaggcctttatgaaccaaactctcacctcggtaagcgtgaactctgtgctcaccacagctgggagtggactggagagatctgctcaggtgttctctgaagctctctgaggagtacatggacctcagtactg

SEQ ID NO: 49222 - DNA, 312 bp, Mus musculus
  source 1..312: mol_type = other DNA
tccctgagactcgcggcacgggtgaaagtgtgttgtaattgctcactggccttttgcattcagcaaagcgaggcagcaggctatccacatctggttgtccctggacagcacctttccgcggctcctctgtgacctcgggcccagctgctgggggcgggggacccaggaggtaccccaagacctccccgcgcgctctgggtgccctgacagtactgtgagtgcgggtccgccagtgccctcaagtgcccagtgggcgggacggaggcggtgaccgggggcggagcctcggggctgggcgcgtgggggtcgcgg

SEQ ID NO: 49223 - DNA, 440 bp, Mus musculus
  source 1..440: mol_type = other DNA
tcagttaactgaaagaccagctataagatagttcaaagaatgataccctggactcaaatagtatgtaaacgcagaatgttttattctgcagaagtccaccatgctgggctctcccacttcctatgggcattccattaccgacccattgtccttgcctcagaccagctgtcagggcagcttctgaggcctggtggaccaattgcccagttcttaaaaacagagatttaggcctagtctcatggaacccatcagaggcaggtgtgttgtttcagaatccaacactcatcgtgagtgaatatcatccccttagatgggtgatagttccaacttcaggttaaagaggctccagctaaaatgcaacttttctgggaagaaaaatcacagctctaccctgtagaagctgggttctttttctgcagcagctgcggggtctaggcgcg

SEQ ID NO: 49224 - DNA, 475 bp, Mus musculus
  source 1..475: mol_type = other DNA
attctggaagtttcagaccaactgtgagacttggtagaatggcagccagcattccctcattctcctatctctgggaaaagggacattcggacgtccctggagacttcctgagactctctggccttaccagcccaggcggcggaacccgccgcccctgccaagccagcccgcgaggccggcccagaagggctctagggcccgcgcatgcggactcggcggccgcagcccggcctccccagcctcttcctcctcggcgctcggcggcggtttggagcccgctgacagctccacgaccagcggacgcagcctcgtcttcagaggcggggcggggcgccagcccccacaaccaatcagcgccaaccacgacccgggcgagctgggccgctctgtggccagaaggaaggcgattgggcggcggcggcgcccggggcgtggctccgcgggccccgcctaccgctgttttccgccgccgggc

SEQ ID NO: 49225 - DNA, 321 bp, Mus musculus
  source 1..321: mol_type = other DNA
cgcattgatcacacagtggctctgtgatacctctacatatttcacaatgtgtattcataagtcatcatttaaaggcctctgaatatatctgcggaacaccgaaactcccgtgaagttcaacatttaaagtaagcacatggctattttacaatgtggctaaattgatactaatttctttgttaccattgtaatctctgaaaacatttcccttttcaatgtgaggtttttaaatgtgtattttgctatcactagtaatgccaaaacggggtttttgctctgttcacagctccagccagaaggtcagccacaagcttgaagcag

SEQ ID NO: 49226 - DNA, 290 bp, Mus musculus
  source 1..290: mol_type = other DNA
atccctggctagggacagtgcttccctccctcagcatccctgactggggacagtacaggagctttcccagagaaatgtgattacactgtgtaggagctgtagctgtattacagccagagcctctctggatgacctgatgtcacattactcaaagagaatctcaggtaaccctgtaacaatatctgacactttttcatgaattattttcattttttatagcataatgaaaattaaaagttttctgttcggtaaaaaaataataatacaaagaaaaatctatctaggacgta

SEQ ID NO: 49227 - DNA, 342 bp, Mus musculus
  source 1..342: mol_type = other DNA
gaagcctgctattttctgaaggaaataaatgtaggatccggtccatgcactgaaaggcaaggcaatatagtggtggatttttcctttgttttggggatgttgtcttgtaaattcataaaaaacagttacaaaactgcttatgctcaatattaaagaactaaatttgagacaaagtttcccttttgtagggattacaaaggtgtatcaccatgagaagcagagttgccctccactgttaattttggatataaatcaaaattatactccaaagcactatctgctgactagaactttgcagaagtctgcccagttttaaactatctgagagcctctgattaggct

SEQ ID NO: 49228 - DNA, 394 bp, Mus musculus
  source 1..394: mol_type = other DNA
acctgagcagatttttgaacagcatcttctaaagaaaacgggctctgttgtggggcacaggaatcacctgggccttccactgatgccacttctgatggcagtggcggggagcgaggtccagccctcagaacctgcacacaggagtcgcctgcgcctggaaagctggccctcacccagggtccctgaccagcggggctggggcagctccagctagcggctgggttccccagacccggcggcggaccctccgaaaatcctcgcggcggccctgcgtaggcaaggggccgatgtccacccgggggctccccccactgcgcccctggacctcgctggccacgcatgcgcacgcccacgaccggcggacggactgcagctccccccaccggaagtggac

SEQ ID NO: 49229 - DNA, 517 bp, Mus musculus
  source 1..517: mol_type = other DNA
gtgtcttgaactacacaaataattaatttactcacatttttcaaatttcctcttatatgaaacattctacagatagtaagaaatggtgggctaataacttttaagtacaggttaagctaaatgaaggaaattaccttccacttcattctgtgacatgtcaccaagtcctaattttaactggagaaaaattctaattgcaatatctctctatatctattctactcatatctatatctatataatctattatctattatatctatctatctatctatctatctatctatctatctatctatctatctatcatttattttattctattgttgttatacattggttttatatattttaaactaggcataaagtttatttttcaaaacctactttaataagggttcttaaatgctatagtactagaacatagatctgtttagaagtaatttcttgaggcaactccaatcttcgttgtctgcagtcttgatatgtgctcacaagccaccagaagttctttggt

SEQ ID NO: 49230 - DNA, 365 bp, Mus musculus
  source 1..365: mol_type = other DNA
tgtcaccaactgggcacactttctcaacactgggcttcagtatctatgaatgagaaaatgtgaataatttgtttactcccattccctgaaaagatagcacacattatgctcatgagcactttcgcctgtttgtgttggaaggaaattccctccaccaaaagattcatgactttggtgcttttccgggcatgctcattaccatatgtggtttataacaaatgtatatatagcatattaattcccataaataaactcaaattagagtccacttttaatagtctcaatgtaaacacttaatattttcaccatccttagaaacataccaagtgttatagcacaatgttccggcggcggcgctgacacaa

SEQ ID NO: 49231 - DNA, 410 bp, Mus musculus
  source 1..410: mol_type = other DNA
gaggtcttgagaggccatggctacattgcagctctgatcaactaatagagttaacaaagacacatcagtttagaagtgtttacatatacacaaactggaagaccaatctttaagattttgttagaagctgagtgggtggacttgagaattgaaaaccctccattatagactctagcctctgaaatcataagccaaaagtgactaatgtacataatttgtccatccgttagtttcttggatgaattcaaagatgtctgaccagagtacattctctttaaagtagctcaactggttttcaacaaaagaatccattacaaggaggaatttattccctgcttcaatcagtacattttctcatagcatccaccagaaagatattaataaatgacaattattttctctagaccatg

SEQ ID NO: 49232 - DNA, 256 bp, Mus musculus
  source 1..256: mol_type = other DNA
tgttttcaaagcatgcagaaatactgagaagaagaaaaaaataaccctttccgttcttttttttcttgctgtcattgcggggttccagtaagtagccactgaaatgacagctccctaatgtttcgtaaggtatcactttgcatgaaaaacactgaattgtctcacaaacgaatgtgtacatctgggatccaattggagcctcggagagggagatttcagagcctgccagcgctgtcagtcatcctatgaggactgc

SEQ ID NO: 49233 - DNA, 724 bp, Mus musculus
  source 1..724: mol_type = other DNA
cctacgattgggtaccaggccgtgcgcaagcgcaaactctcagcccctccaggccccggaggggagttggctctagagtccggactcacaatctgattggctacagtgaatccgagcttccgcgcagacacccccgcaggctgttgtcccgacagtggggggcggatccgagctccaggttttccaggcgcccaaggctgtctaccagcccggggggaggagctcggctcgggccggtgacgtcatcgggcgcggaccgggtttgcgtgtagcctgggcgccacggactagcctcatggcggcggcccttaaggctcacgtcgttacgtataggctgagtcatgtatgtcagccataggccggcccgtcctgaggtccccaagcacggtgcgcacggcttcctaagccaaacccccgagcgtgggcgtctgacgttgcctgccttcgggcggaggagagcgcgcagacgcagtacggaggccgcggaagccggtcttctctggagcgcgcggacggtcgctaggcgacggcgcgaggggcgggctttcttatagacccctcccacccggctggctccgccccgggcagcgctgcggctgggctcgggcgcgcgctccagcgctggggaagcggcggcggcggcggcagcagcggcggcgggagctgggcgtggaggcgcgaggggcggggcgggcggcattgcgggcccgcggttcgggcggct

SEQ ID NO: 49234 - DNA, 582 bp, Mus musculus
  source 1..582: mol_type = other DNA
gaggtgagagggaggcagcctctggtcccctccatgctccatccaaggtccgtgatgagcaacccctcttccgggacagtccctggacgtgagtcacaggacagaggtcttagggaggggggtcccggggccccaaagccctaaggcgcggctacgcggcgggcggcagggaaagggagtccagccagcccgcggcgccgaaatctcccgcgctcaggagctggcccctcctccgggcccggcctcacgcccctcgcggcggcccagccggatcggctcctcccaacccgcgccccgtctggccgccacacacgcccgccagccccgcctcccggcgcgcgctggagtgacgacaccgcagggtgcgtgaccaatcggcgtggccctcgagggggggcggcctcgggcacgccccccgcgccgcgagccaatgggacgccggcgtcggcggccgcggccgggtgagagggcgcgaggccccgccccgtcctccctcggccccctgcccctcatccccgcgccgccgctggtgccggtcgccgcgctgggcccgcccccaaccctcccgccggcccgccagcg

SEQ ID NO: 49235 - DNA, 431 bp, Mus musculus
  source 1..431: mol_type = other DNA
gactgaggtcagtgaattggctctaggggcgggtccacactagcctctggatccggcagaaatcgctaagcagggcattctgcccgagcagcatcagaggtggcacctgtgtctctggggccggaatcaggcttccaaaggcgacctgcggagtcagtccgggcctccgcatcccgctggacaccagcgactagcgctcgcgtctccgcggtggcgggtggtgcagctcagacaccaagctccagggtggcgtggccctgcccacggtccacctttctgcgcacctgcctccggggcggggcggagcggggcggggccgctgtgcgggcgcaggtcacggctcggacgctggagggggctgtggctctccgccgtccccaggctgtgcccaggctccccctgccgagggctcggcccaggccctgggaggg

SEQ ID NO: 49236 - DNA, 283 bp, Mus musculus
  source 1..283: mol_type = other DNA
ccacgttttaattctggagatacttgcctgcatttctaactagaattagatgtgaaaatcctggatgataaagacaattagaagcaaatagctgttccttatttctgcttacacagaagtctgataactaaataggaatggaattgggggcaggtttgttctctctgctctagagaccttgtgacctcaggctccaaggcttccaaagccttaggtgtcacagtcctgagacctcagtctatccactgcagcatacatgcttcgggcctctggactgaaggag

SEQ ID NO: 49237 - DNA, 300 bp, Mus musculus
  source 1..300: mol_type = other DNA
gtcacccactgtcctctaagcccattaagctcaccagctcaattgtcacttgtgtggttgctgctacgctctccagtcgagtcaactgggtaaagctcctaggactgtacacgatgtagatggtacaatgtaaggaggtctcagatgctcaggccagggatctggatgtagacctgtcagctacctctccagcacctctcaaactgtaagccagcctcagggaaatgctttcctttgtaagggttgtcatggtcatggtgtctcttcattaactgactaagacaagattaagttaactta

SEQ ID NO: 49238 - DNA, 616 bp, Mus musculus
  source 1..616: mol_type = other DNA
cagagaataatctcttctctaccttagtcgaggatttatgcgtcctctagaggcctcagggtccctatggcgagagacacagcgattctaaataaagtacttgtccatccttccttgtttgctgcagaagcggcagcttaggaggagccttcttgtgcgcagcgcagagatggcggggcccagcccttcctctgtccagctaacagccggcggcccaggcgaggctgagttcagtacccaaggcagtgacgctccggccggggcttttggaataggccccaggctaggcccctctggggacaccccgagtgcagactctggcctctggagggccgggaagggtaggagtgggcggtgctcttcgctcccccaaactcagctctcttccgcgcgcgaggcccaccccgcggttccgaaggaccccggcgcacagcacccgagagcgcccgcctgcccgccgggccccggggaccccgcctgcgcgcccgcagggaggcgcgactgcggcctagggcgcccggcggctcctcccctccccctccccctcccggaagcgcggggcggggtccccggccgggccgcgggggcgggcgcgggggccgggccggggcggggc

SEQ ID NO: 49239 - DNA, 282 bp, Mus musculus
  source 1..282: mol_type = other DNA
cggagcttcagcttggaagaaatgtacttaatgctcaggatggtcactgaatactgtatacatcacacggatctctttctcaataaataaatgaataaataaacaaatgattgaaacccattttcagccaggccaagtattacaatagactgccaaacatgcaagtcctgctttcttgactcagtagggagtccgtggccccctgctccagagggtctgggaccagcgtcctagggactcggttccttcaagggtggagcccagccggccccgccttgcact

SEQ ID NO: 49240 - DNA, 303 bp, Mus musculus
  source 1..303: mol_type = other DNA
gtgtttgctaggccccggcctagtctcacaagagagcacacacacgttgttgtgtgcaaagaaaatgtccatggtaaatgctttggctgcattattaatttattcagcattacggtatcatggcataaaacagatacatgaggagaatgatcaggagccaagttcttggtgcttagcctagctgggggcttcagatcggaagtccttatgagggagcctcgctgggatcgctgatttggcccacgctgtgtggaacagacacaatgaggctcagtacactgtgcgagcaggagcctcccattc

SEQ ID NO: 49241 - DNA, 625 bp, Mus musculus
  source 1..625: mol_type = other DNA
gccaaggctgactctgggccggagagcccgccccgatggaagccacagagcatgcgcatcagcggagccccaagctcccctgcttgcgcgctctctgcgcgggggctagggctgtgccctcctctcggaggtacgccgtcagcagcggtgaccccggaggtcccgggttcggcacccgcggggtagaaggctcactgcaggctgcctcgtcctaggtgacgcagcacgcggcccgaggtctgtgttgggccctacgcccatccggatcgacgctgctcgttcagggcattatggtgccagcgagtccgcaccctcacggctctttggggcctcgacagtctgtgccctccggggcggaggaatcaccagattccagagtcaggtcctgcccccatcggccccgccccacagggcgccccgcccatcggccccgccccacctcgccggacgccccgcccctaggaggcggccgcgcagggaggtcgggggcatcgcggcgagcgctgcgcgtaggatcgtccggagctagcccaggcgccgcagcaggcacgcgggcccggggaggacacctcggggcgtgacgcggcacagagggcgtggcccgggctgcagcgcctgaggaccc

SEQ ID NO: 49242 - DNA, 383 bp, Mus musculus
  source 1..383: mol_type = other DNA
ttagattaaatggcatttttccctccataaaatgtcaaagtttaaatggtacctgcagtaaaatcggccgggtcttctgaacacccttcaggattttgtgggaatcagcttctgcgaagatcataaggaaataattttcctgcgaaaatttttaaaacttaccccagcaaccccaggtgcttggtgggtcaccggaagcagactgttcactgagcgccaaggcccacacggaagtactgagcatgcgtgggactcgcggccgtctcgcccacacggcgcttcacgccgtaagcctacgcacttcctctctgggaaggaaggggcgggctctggccgagtgtgcacgccccacgggctgcgcatgcgccttcttcctggcggct

SEQ ID NO: 49243 - DNA, 606 bp, Mus musculus
  source 1..606: mol_type = other DNA
ggaaccgagcagggttccagcgtcgcccccacgtcttccagccccgcactcgagtcgccaagtgcgtgcgtgggcccgggccacgagatgagcggggcacccggctggaccctaactgcccagcccacctgcagcagggcaggagctgctgcgcaccttgtggggagcggaatggacgtggcaccccctcggccctcggggctatggtgggtgcggcgcccgctgccccctaagagctcgggcgcgggaggcaaggggcccccagcctcctgcaaccccgagtcccccgctgccccgagccgggtccgggaagagctcggaagccggtgctggtgaacatggtcccgccgggcccggagcccccgcggggcgtcagggggaggggagggcgaccgcgcaggcgcactgtcaaccagcgagcgaagtcggcccggcgaggcgctccggagccgccaggaagaaggcgcatgcgcagcccgtggggcgtgcacactcggccagagcccgccccttccttcccagagaggaagtgcgtaggcttacggcgtgaagcgccgtgtgggcgagacggccgcgagtcccacgcatgctcagtacttccgtgtg

SEQ ID NO: 49244 - DNA, 356 bp, Mus musculus
  source 1..356: mol_type = other DNA
cccgtgtgcatatgtgtgcgcacgtgtgtgtgcacgtgtatacctgtgtgcatgctgacactccatttcttcatccaaacagtagtttgaagaccaactcactagtagaacgtttccataacttaaattaggtactaaatatggagatcataaacaacattaactggctctgacagtcagctctcagactatgtaacaggagtgttctttgaaaggctcatgacgttcacaacagaatgtaccatctggagttcaaacagtttgctgttagtgtgcctaatctcaacactgtttagttaagagtccactctctaaagtcaactcaacatactggaggttgaataaacttctccgcc

SEQ ID NO: 49245 - DNA, 372 bp, Mus musculus
  source 1..372: mol_type = other DNA
ggctgacagctggagtccagctctcaagcttaggcaccatttaaaggctggcaaataatgtgtagccaagctgggctactttaactcagagtagctagacagcgatgctctgggctgcctacatggatgttcatgcaagaaaaaaattactgcaagtcttccctgacagatctgcagggcagggcagggcagagcagagcagagcgttctcatgagtgctatgcatttcaactggataggaactacacgaggagcttagaaagcagctaggctttgaaccttgctttaattcaagaatatctgcctttcttcaagatatgccattgtttcaagagcataaagtcccacgctgagtgtctcatttgtttcctg

SEQ ID NO: 49246 - DNA, 349 bp, Mus musculus
  source 1..349: mol_type = other DNA
ctatttccctgaataaggacttaagcctctcctgtcttgggcatgggtgaccctgcttgctcagagcactctacgcagtacctgctggccactgagtcagtcagttgatttttccttaacctaaactttatgtaaaatatcaacataaggtctctttctgtttaaagcttattgcttaaaaaaaaaaaaaaaaacttttaagacttaaatccttattgaaaaaaatttaaaagttccatagatatgagcatttcacaaagtccaaggggcttttgaacagtttttaaaaatcagtatcagaaaaacgtagcatatgtgaggttaactgatcacggctatgctcagtcac

SEQ ID NO: 49247 - DNA, 336 bp, Mus musculus
  source 1..336: mol_type = other DNA
tacaagttgtatctgagataccaggactcagacaaatagagaagtccccagctccccctggggccctggacaaatgaaatgcatttttaaccaaaatcttcttaaaggttaaagagctgaagatctcacatccctaaaaaggcatattttcagtggtattaggacctggtaaaaattaggaccaaattggggcatcagtcagaaacgctttctgagtttaggatgaaccaaaggtaagcattgcttcatgaacgatttggaaagccttacggagtctaacagtgctaatttaagatttcctttaaaaatctttactaaggttcctaggtgggcctg

SEQ ID NO: 49248 - DNA, 260 bp, Mus musculus
  source 1..260: mol_type = other DNA
ctgtcctggaactcactctgtagaccaggctggcttcgaacgcagaaatctccagcttctctcagtttccggagacccgcaggcattgggaaggggcctgtgtgggtcccaagcctgcacagaaaacccaagtttctctaattgggtcaccaaagcctccgcgcagagccgcgcagggctcgcagagctggactggcctggcggggggccgggctaagcctggtagggcgggcgtggccgaatccagctaggcggggcga

SEQ ID NO: 49249 - DNA, 560 bp, Mus musculus
  source 1..560: mol_type = other DNA
aaaaatttaatagcatgagactacaaacttttttgaatttacctattttatattctaagaattcggttgaagtctaaaactccatgggctttttatgctaaactttccttgagcataatgctaaccatttcccattatcaatgggaaaagctatgcaccttgtcgaagagtaataatgccgtaatagtcttccttaacacgactgctttgcttaactaagcttctgaaagatatgtttgttgtgtgcacacttctcccacacaatttccgatgcttaggaattattcttgcaaataacctctaagagctgtttaaagatttacgatcatcagtcctgagcggggtgcgcccgagaagcgcggcgctctggagcgccacggtggaacctggaacccgactgtgggtgccggaagcgcgcaggcggaagtcacccagatcccggaacgcggatctcttggccgccccgcccggaaagagcccgctgcgcttgcggcgccggcactgagcatgtgcgtgcggccccgcgcatgctccgtggaggcccgcttcggtttctgtcg

SEQ ID NO: 49250 - DNA, 664 bp, Mus musculus
  source 1..664: mol_type = other DNA
ctcttaaaaattttatagcttaaaaaaaaatttaaaggccagggactaaacttaactacaactagtctttattaacgcggttttcaaggagggttacgaaattaagttactggtacctgcgtgcaggccagtccaagggcgctccgcaagccgccggggtccgggcaaagcgccccgagctgcagcgacgagcccgcggggaccacccggggtccgcaggcccccgtcccgtcgcggctcgaaatgcgactcccaccgcggcgcgcagcccgacagtcttctcttcggcgcagaagttgaccggcgccaggccgggcaggtagaaggcgcttcccgggcgcgggcctgggaccgtccctagcaggagcagcgacagcagcagcaacctggagccttgcgctggcggcgacgctggcggcctggagctcatgccggcggctgtgagaggcgagcggccggaggggtccggggcgctcggagatcacctcaaggcccgagcgcacccgcggttccgcgggccccgcgacagaaaccgaagcgggcctccacggagcatgcgcggggccgcacgcacatgctcagtgccggcgccgcaagcgcagcgggctctttccgggcggggcggccaagagatccgcgttccgggatctgggtgacttccgcc

SEQ ID NO: 49251 - DNA, 233 bp, Mus musculus
  source 1..233: mol_type = other DNA
ttaagtgctcagtgctctgctcagaacagatcaaagcctaagacccctaccttttagtggtaatagaaattttcacattaatgctgtaaattctgcaacatattttgacgcctgatcataatgaaaaaacatttattttccgaaccatcttggaaggttcttccaccggggggtctgctccaggtggtacacccaccgggtcaaccctttgaacgcggaggttggcaacagca

SEQ ID NO: 49252 - DNA, 387 bp, Mus musculus
  source 1..387: mol_type = other DNA
ttccagtgtttggaaatttctaaaaaccatgcttcaagaaccagttgactatagcttctcaaagaggagagacaagagttggctgtctggagaggccagggtatcctggcaaattgactttggcagcctggaggggtttaataccttggaaggtcctatttcgcactaacagccttgctgtaaaaaacagaaagagcctgtgtcccttcacctcaagatagactatgtagccctaacacgtgggcctaaggtccttctcccgcccaagtgagctgatggggagggtttttgtacaaacaggtccccccgtcagtgcactgggcacgcacttgggttccaggctccttgccaagagcgcgcgggcaccctgcatggcacactggctga

SEQ ID NO: 49253 - DNA, 644 bp, Mus musculus
  source 1..644: mol_type = other DNA
gcgcgtccgagtgcgcgtggtgaaggccgccggcgccgggtccgaagagcccgtgctgcccgcctcccggcgccgagtccccgaagccccggctgcggaacaggagccaacgtgtgcggcgtggggccctagagccgcggccgcagcggctgcagcagccgaacccgggtaagcacccggaccggcgcccatgtgcgccgcggccgagtccacgaagccgttctgagctgccgccaggctcagctcgcggtcctgcatctcggccgccgcagccgccgctgccgcggccgagtggtggtggtggcgcgcgaagctgcccaccccgatggccgggaactgcggccccgcgtccagaagcatggccagcgcgcccggccgccccgccggcgccggtgaaccccgccgcctggatttccggatcggcgaggcgcgtcctctggacgcccggctccgtgaaccggcggtggaaatactggcgactgcagtctcgggagccgggctggtgcgcccgccgccgccgcctgtatctgcctcaggcggccgggcaccgagcgaggggggccgccggagggcgagctcagcgccgcggcccccacccctgcgcgcccccgcgcgcgcacgcacgcacgcactcactcgctagc

SEQ ID NO: 49254 - DNA, 500 bp, Mus musculus
  source 1..500: mol_type = other DNA
gctgctgctgcggcctcagcgcccaccggctgcccactgcagctgtcctcgctgatgcgagcactcattcccggaccaacttaaagaaagaggggacgacgcgcccgtttccttctactccgggcgtcgccaatgccaagctccggcagcgctctgggcggcgtgagcaaggcctcgggggagggagcggccacccgagagcgccgtggactcgacgcctagcctcctcctcccggctgcccagcgcccctgcggagatcaggtggagcggcgggtgcgccaggctctggggctggcggagcttgccctgccagcttgtgtgcgcacagccactgccctagggcactgtggccccgcagccgcgttgacttcattcggcggatgccgctgatctcagccaggctccgccgctagcgagtgagtgcgtgcgtgcgtgcgcgcgcgggggcgcgcaggggtgggggccgcggcgctgagctcgccctccggcggcccccctc

SEQ ID NO: 49255 - DNA, 361 bp, Mus musculus
  source 1..361: mol_type = other DNA
aggcttgggatttcaaactccagggcaggctgcctctttcagctttttaaatagctagagaaagcatttcatgatgtgaaggaaggactgtggtcgtattaccctcagtccagaggctaagactcttgcctgcagacagatggccatggcttagcagccttccgagcataccttggctgctgtacctaccaggcaaggcatgtaccagcgcacagccctgcaggtgcaggtgctagagtggggacagtgtgcagtgctttgtgtacactacagccacctatagggctgacaaaacatttttgtcatatactctaatctgatgtgacttaatactgctttagtcttaaggagcacctggact

SEQ ID NO: 49256 - DNA, 557 bp, Mus musculus
  source 1..557: mol_type = other DNA
acaaaagtatacataaataaaaattacaattggatattataatttttcttcaatgtatttacttgtacttctcagatggaaaaattatttgtgtgtatatgtatgtgtacatgtgtgtgtacatgacatgcatatggaggtcacttagtgctttcctctgatttaggtcctagaaatcagacttaggtcctcaggctccgtgattaagtccctttatagagccaagtagtttctattacaggcccctttcactgaaggaatctttgcagtaaaaacctttggtaagaactttcagtttctcagccaatcgcaaatgttgcgaagcctggcttcctgactgttttaagttaattctgtaggacagtactttaaaatatccaccgagaaattaaaaggagccaacgttctttggaagccaaaagcaggctccagtcagctttttcagaggcgaccggctctgcgccgcagtcggaccagctccctcccaagcctactcgccagggggcggagcttagagctcaaggctcctgattggccgtcccgcgggcactcccctt

SEQ ID NO: 49257 - DNA, 393 bp, Mus musculus
  source 1..393: mol_type = other DNA
aaaaattaacctttgcagggtttgttttactagtttaaataaaatttgcaaactagcttttagaactcagggacttctcagagaagtacttcaattagaagaaatcttttaacataaataaatgagcttggagttaagctaagttaaaatacacgcacacctcaaattttatgtaacgttataactcgttgattagagttaaacagcaataataacgttttgctaaagtaaaattaaaaaaacatttcttttgaaaaccccttaggatcttaagctacctgttggagctgtctgtcccgcgagagacagcacgggccgcccgggcagctttccggggtgggggtggggggtcaaatgcgcgctccgcccagcgcgttccgccaggcagaccca

SEQ ID NO: 49258 - DNA, 301 bp, Mus musculus
  source 1..301: mol_type = other DNA
ttgtagacttggacatctatttaaaatacaaccacatgctagagacaatgggtctctagtctcaccatctcgagaaaatcttatgtcctaagggtaggatgtaggggaaagctagttcttccattagctcctaaacaagttttattttaaaaagagttggtaagtacagttacctgtatccccctcagatctgagtttagcatcacctcacgtgcgcgctgccaggtgcgctccgtggcgctgccggggcgggcggagcggcgagagaccagcaggagcgccgcccggggcggtttggttg

SEQ ID NO: 49259 - DNA, 198 bp, Mus musculus
  source 1..198: mol_type = other DNA
cagttaccttcccatcaggagggaggtgtagcaccggccttaggaggttcccgtttcaacagcggccaggcccgggaaccgccgctgctgcttcgcgtcccagctgcgctcccgcggcgggaggcgggaccagccgcggcggcgcggcggggggcgggacgcggcggggtgggagtgggagggcagcccctcccctgg

SEQ ID NO: 49260 - DNA, 409 bp, Mus musculus
  source 1..409: mol_type = other DNA
ccagtattgaaattatttttaattttattatgaaaatgtttaatcctttgtctgaattacagctttttatacagttggtaattctgaagtttttagcaatttgatgaaaaaacaatctcacatttctatatattgtgaaacactgattattaacatgccaaagaacctaatagggttgtaaagatagagacaacattttgtgacaggcagttgtttttcacttaagttccttttagaggaagcttcatctgatcctaaagacaagagttaaccatgtacgaacaccctttagcctctatctacatggtgacatatttaaaagactgaaacattactgatgtatttattactttgcaatttcatacttaggagcgcataaagtagcacttgcccagctgtcacctgcaag

SEQ ID NO: 49261 - DNA, 474 bp, Mus musculus
  source 1..474: mol_type = other DNA
agcgataaaataaaattgcatctcttttctcttcgttacctgcatctaatcaggaagtcttcctgaaaaggaagatgtcccctttgtcctttgtatgcctcttccatctggcacagagtctggtgcctgatagaagtgtaattagcaaaacaatgtgtgatcattctcacaatcagaattaatatcatgactaaaaaacactgctgatttatttttttttttttttagtgcaaatcacactttaaacatatattttattttgtttctgcctactgaaatcacaggaaagaatacaactttaatttggactgtccaagtcaagaagacaaagcttaataaatacaaagttgtgattgccagctttgttgaagaaagacaagattttctcaaatctgtgaacaggacacttttttaaaatgtcaaaataaaccatcactctccactggaggagtttggcacccgcaccccgcaaag

SEQ ID NO: 49262 - DNA, 357 bp, Mus musculus
  source 1..357: mol_type = other DNA
agcaagtaagtcaacttacatgcatccctagatatgtgaattccgtaagatgaaacaaactccttgtttatctaagttgcttctagttatgttttatcacagcaacacaataaaaaataactaagtcttctaggtcaaatatatttggtatgtcacatgtatccttgagataatctaaggtgaaaaggcacaaaatcatcagagtatgatgtccccaaggcgacaccctgtcgccccggggggtaaaggatgcacagtgtagagactctctacggaagcttgggccattgcttaagcaactactggacaccatgaaggtgaattatgacctcagggttcagatctcagctcgactgg

SEQ ID NO: 49263 - DNA, 241 bp, Mus musculus
  source 1..241: mol_type = other DNA
cctcagctgctgctgagagaaattcatttgagccaaagtggatgtatattccttcaattcattagtattttaaaacacaagagcggaccgctgtggccgcacctgcctgagggcagcttgagcagggcactgagacctctccatctggactcagaagcagctgcgacctcgtccaagctcagtagactgggcgatgggtcctagtagggactgaccaccctcacttagggcgagcagctgt

SEQ ID NO: 49264 - DNA, 670 bp, Mus musculus
  source 1..670: mol_type = other DNA
tcttttttaattttctaaaaaattatttttgagttcattattttttaaatgactttttaaaaatttgatatatttaatgtatgagtactttgttgcatatacatctgcaggccagaagaggtcatcagatccacttatgggaattgaatattatttttaattcttcaattaccaactagtctttattctcatacaatacatatattttaattctatgtgttgtagatgtttaaaaatctttattgcttgcatgtatgtatgtgtaccatatacatagctggagaatcttcagagactgaatatatacatggtggtaaactactatgtggtactgcaatacactagagccatcacacgtgatatgtagactttatctctagaaattcctttgggattatttttatttcttctaactataaacagaaatcaaactcagggaaacaaatcaggccttaatgttttctttgtattttagaaactaagcagatcttgctttcaagatttgtaatgtgagacagattcaaggttgctttttttttttttcctaatactgaggaaagatatatttgctctttgttcagaaccctgtgagttatgaaaaaaattcagcgtgactgtgattctcagttctgtgcatctgagactccaataccctcatatctgtatacat

SEQ ID NO: 49265 - DNA, 366 bp, Mus musculus
  source 1..366: mol_type = other DNA
ctttctaaaaatgaacctggtttatatttttccatgagcatggtaagttagagtcacattctaaaaaataaaggtacctgagttttccttaatatctaagaagagttcattattttctaaggtttactcattataattgttaattgtaattttaaaattcgcttttagcagaactagctctgagagccagcagcaggggtggcacacactgcagtgacagtccctcccagggctggttgaggcacctcactggtgacgggtctgaaagcacgtggctacgtcatggaaagctaactcacagccgaggctgggcgaactgcaggttcagtcgctctggcgattgcttgtttaaaaaaaaaaaaagaa

SEQ ID NO: 49266 - DNA, 333 bp, Mus musculus
  source 1..333: mol_type = other DNA
cgccctggatttgattcctggaacccagttaaaggacaagtgtcttctgagtgtgtgtgtgtgtgtgtgagagagagagagagagagacattttaaatgaggcctggtttctttcagattgaagacgattttcttagttcattatattaaaggaaacccgcaagcataccaattgaaattctgctgacttttgtatagaacttcctcttcataaaggaaaaggaaaacaaacatgttttcccttcttttaaaacagctgtgtaacttgctattttcccgtttcgaaaggaaaggcacttggaggacctgattactttggactgcacctcagag

SEQ ID NO: 49267 - DNA, 547 bp, Mus musculus
  source 1..547: mol_type = other DNA
atctttcaagtcttattaaaatatatctatgcgttggtaccaatgctaaaggactcaaattctccacttgtaatactttgctataccttaaactttcaaataatgaaatatgaataatcctattactgtttacattcctgtgcctgaaaaaattaattctatagaaaaatcaaattaatgaaatttaagtttttatttctcattcaaataccttttcagcagataaattatgataatttttgaacacttgaagcaagagaccctatcatgttttaagtgataaattcatttaattggtagaacaaccttaatgagtagaaatttttattaatgatactatatggataaatatagtccatgccctgaatcactaaatcagtaagacatgaaactatcaaataattgaatctggtactttaaagggcttataaaccactgggatgaatatgggttcttatttatttaatttgctgatgtataaaccaagcaaagctggttcattcttaagttgccaaaacagattagaggtgggggaccctgcttccca

SEQ ID NO: 49268 - DNA, 268 bp, Mus musculus
  source 1..268: mol_type = other DNA
ttcagctattgaatgtaattgaggaaaatatgtaataaaatattttaaaaaataaaaataaaaaaaatggctacttcttcctgtacctgcaggaggtgcactgcgggaagtctcccgcaaccagccctgcggactgagtagcgggggcggcgttcagcctccccgcagcggccccggagctagctgccctcagctcccgctgcccttcccctaggcagcctggatccccgaggcggcggcgggtccctcgcagagccgaacgccagcc

SEQ ID NO: 49269 - DNA, 335 bp, Mus musculus
  source 1..335: mol_type = other DNA
gaccttttatgatagatcattgattgaacaattttttagtgtatgtcaccattttggtagaaaatacctaataatggagtttttgttacgctgatgagggcattatgtacacagcctagataaaattggctacatcttgtgttacaacattatttactttaaaatcctgagtgctcatgcatatatccacatacatgtagttaaataaaattttaagcaaagcttacaagtttcacccaacctcatgagggccaaggttatctttaataacacttcaacaagccctagctcccaggtccttgtggtgggtgagtcattccgggccacctcggcct

SEQ ID NO: 49270 - DNA, 396 bp, Mus musculus
  source 1..396: mol_type = other DNA
atcatggccacttgcagaaaagtgactgtggttagtcactcttaaacgatcacattactattttcatagtttaaatattttctaccaggctacaacaaaaaccttaaaattaagatgaagggtagagttattcaaaatgaggtcgctgccacgtttaggtcgcaagacatttaaggtactttaagtgtgagctaatgccagctagcaggctgaggactgccaagttgtctgccagctgctgcggctgcaatctccctgcacccgcggagagagtcgactggcccctcgcagcacggaacgacctttgcgggccggggcggtcgtagcccggagcctatgtctccgcccaccggctgggcgggctccgcccccactccgccagccaggccgtcaggt

SEQ ID NO: 49271 - DNA, 503 bp, Mus musculus
  source 1..503: mol_type = other DNA
acctattttcccttctaagaaaatacctaaggaactgtgtacaatatgtatttacagctgaattttgaattgaaaacaaagtggaaatttacaaggcagtaatgtacaacaaaaaaacatactgttcattttctgggcagtatgaacattccggagaaataaagtccttactgcccaatggggaccagctcagcagtgccaccagggaccccgcctcggaccgaaggccgcgccttctggccaccgagcgcagcggtcccggtgctgtatgtgagcctgagccaggtccccgagctcttccacccgacaccggacaccgcggccgccatggccagctcgggcgcgcccgccctgtccacgtgaccacgtgagccccagatcacctgacggcctggctggcggagtgggggcggagcccgcccagccggtgggcggagacataggctccgggctacgaccgccccggcccgcaaaggtcgttccgtgctgcgaggggccagtcg

SEQ ID NO: 49272 - DNA, 237 bp, Mus musculus
  source 1..237: mol_type = other DNA
ttaaggaagttaaagagtcatttactaaatttaaactgtttaggactcgatgggcttttaatccaataaaaggatttcccgggcttccaagtggtcttttaaacaatattagctaaattttttctggaattgttgggactccggttccaggaaaattctgtagatgaagcctgtactcattccagagggcgatttaaccctggttgatgccaagccttgcgcgaggggaaggcaggc

SEQ ID NO: 49273 - DNA, 392 bp, Mus musculus
  source 1..392: mol_type = other DNA
aatattagctaaattttttctggaattgttgggactccggttccaggaaaattctgtagatgaagcctgtactcattccagagggcgatttaaccctggttgatgccaagccttgcgcgaggggaaggcaggctctagcgccccctccagcctgagtgcagcgcccgccgctgcgggtgtgcccgcagatgagctggagcccagcacctccggccccggcacaacccgcggggctcgtcctagctgtgccctgtctcgcttcttgacaagccagcaggcagcaaggggcggcaccgctctgaggtcccgaggacgtcactgacgcgcggtcgagcctccagcccgccctaccagccggtgacgccgccgcggccccgggcaaccagcactcg

SEQ ID NO: 49274 - DNA, 497 bp, Mus musculus
  source 1..497: mol_type = other DNA
taatttaaacttagacaaacatgcactgtcaaaagaaagtttttgaccttggcccaaggacatccctgtgtcgtgcatccaaatttgcatgcaattacccaaatgcctcctttgaggaatttaacaacgcaatgactcagttctgaaccattccctagcacacgagggagtcctgtgatacatctttagattctcaacaagcacacagtgcaagtaaatgccctgcgtgatgcactcttcttaagttcaggactgcaatttgaaacctcttcaaagaaaactttgcaggttcgggaagaggctcctgaggtgcttagaggctagaccctctacaatgtataaactgcagcggagcgccgccagccctccttctgcttccaaacgcttggcaggctacgggttcccctttctaccgccatatagggaaggggaggatggggagcggcagtccgcctccgcagcgcacagcatccgcccacgccagcagcggttaaccc

SEQ ID NO: 49275 - DNA, 397 bp, Mus musculus
  source 1..397: mol_type = other DNA
tctctgagtggtaatggcctagcacatggtcactctgactcatacagtcctgttggacccagacatttctctggagccacatgagcgatttctctctggagagacacatctctttagtctgcattccaccaaatgctactggcagtaattacagcatgtcatttcctgagtgccgtgaaacccagaaaggaactgcatcaatgaaggtcttcacaccttgacccgtgaaatgcctgggaccagggattaatatagaagagaatatactgtccttcataaataaagacctccattttgtataaataagtcggaggactctttgctgagaaaggtttgctcttcaagactgcctttcacggaaaacgaagtttttaaattttatttttgtatgtttgtt

SEQ ID NO: 49276 - DNA, 458 bp, Mus musculus
  source 1..458: mol_type = other DNA
taaacacaatcgatttaaactcaatttctagtcatttttaaagtaacacaaaaaaggagaagtaacaaagtacatttactgcatttgagactgattagcattttcctaatgagaacctgcgacagactcaggttttccacgttttgaatctattgtcactaggagagaaaaaagaaaaaaagaataacggtttcattttaattcttaatttcaattgccagcaattttacatattataaaaatatagggcattttataagaaagttaatttcttagtacattggttcctcagtagctagtgtccaaataaatttattgtacacttagaagaagaagagggtaagagctattgcaacaactctcagaaactgctatacttagaatttcgggatttctgcttatctaagctaattatttcaaaagtcggagtttcgacacaatatttattctgtcaacag

SEQ ID NO: 49277 - DNA, 248 bp, Mus musculus
  source 1..248: mol_type = other DNA
tctgagagggtgcccgtgcccacccctagagctttacacatctgctacatatgcaggcaagttgactcatctgtttcagtcagctgctggatagagcttctcagagacagttatgctagatcctagaatatattgtgccagaagtcatcgtctttattcaggtccaccctatgaaaatatcatagccaagatattcatatttcaactgcccctgacaggcattccggtccactgagcatgccctgttg

SEQ ID NO: 49278 - DNA, 515 bp, Mus musculus
  source 1..515: mol_type = other DNA
tagcccccaaacactttttgcgattaatctgtgaaagtcaaagaaaaaaaaatgttattctccatttgtttccaggaaaaaaaaaatccattctcaaacatagaatttacttttcacagatggagctacatccagatctacctatttttagcactagtggtttttaaatgaccagataccttgttaaagacaaactctcatagatattatttttcagaattatgagacaaatacaattttatattttaaagatctgagtctcaagtactttgttattaaaacagaaaatggatacaaagcaatctcaaaatctgctttataatatctgttaagagaatcatgagatagtttagtagattaaagtagtaaaaaggttttgaatcacttaaatgatgaactgaagacatttactgtctttcctaattaacagatatacttcccagaaacatatctgtgattttacagaggcaggctctctgtgtccctggagagtctggtgaagactcagcacagct

SEQ ID NO: 49279 - DNA, 333 bp, Mus musculus
  source 1..333: mol_type = other DNA
tatatatagccctggctgtgtagaccaggctggccttgaactcagaaattctgtaagagcaaaaagtgttcttactgctaagccatccagctcctacatttctagaggtgggatacatttacaattttgatctattttttacctgcattttgaagattactctccacaaatcaaacatcctggaggaggtcccgggttgtcctgggtggcctagaacacactgtgtagactagccagccgaatgctggcatcagaggtgtgggccaccctttgtcacacacacacacacacagagagagagagagagagagaccgagagtgctccgggctgac

SEQ ID NO: 49280 - DNA, 459 bp, Mus musculus
  source 1..459: mol_type = other DNA
tgagtggaaaggattatacatttttctttctactcttggtacgatttgctaacaaaaaacaaaacaaaacaaaaagcttccttggtgtttgctttgttctgcctatcttaagatttttgaatgtgatagactagcgattctcacatttggtaactaatctacttatttcaaaatgatctaggaaagtgttttatacagtacagacttgcaaactgtactcaagtctaggcccgagtcagaagctaactaagaacgaacctgggaaggctggctttcccggatcgggatcccagtcccagcactgcacaaccgccaggggcgccgccacgcactgggtgtctgactcccctcgagccccgggaccggtctccaaccaggaggcgggccgctggggagggcggagccacagcgccaggcacgccccctaccggtggcgcggctctctcgcccgggagacaa

SEQ ID NO: 49281 - DNA, 698 bp, Mus musculus
  source 1..698: mol_type = other DNA
aattttcatcccaaagaaaaatgacatttttcgtctccaaaaaaaaatttttctccatcgacattgatagagattcaaattgcaaaatcgaaggatgacatatatatttttacctattgttagaactgagtaacagattcacttcaaaatgttacaaataaacttctttggtgactggatatggctccatttatacaaacaacacactttttcaagtggactgaaaatgtacattttattgaaaatgtaaaaatattagtttctaaacacgataagttccacaggggaaatttgacggtagcaaatttcctaggaagtctctcgatgagatgaaaatcaagatttcaaccctgtcttgtttcaaagcacgccgcgctatcctacgggggtggggtgctgtaccgcacccacagaccctcgggtggccgcggtcggctccgcggcgggggaagccctcccgcgcgcagaagcgcgggcgcgcgcagagggatgcggggcgccgaggcgagtaccggcgccgctcccgccgcctagcccgccagggggagcgagtgcgctcggcggccggctgcggggactgcggggcctgcgcgggcggtggccggcgactgcgccccaccgcggcgcacccgcgtccccaccccctcggcgcccgcccgcccccggcgcggccctgcccgccccctccgccccctccc

SEQ ID NO: 49282 - DNA, 284 bp, Mus musculus
  source 1..284: mol_type = other DNA
ggggccagtgaactcacctgcccgagagcagcttcttaataaacctgcagttgtatatattttaatctttaccagtggagaaataacttatcagtttacctcaacaataagaagtgacaggtgctactttcaggctctgctgtggattctcacaggaagcttgcagtccatgaccaaagctagtttcacattatagaaggaaaccccttgggccagaccacctgccaagggtgtggcactgccttcagcggctaggccggtcagatcccatagtccctagggcg

SEQ ID NO: 49283 - DNA, 435 bp, Mus musculus
  source 1..435: mol_type = other DNA
ctgcatattaaatttcctactttgtaaaatgtatttttcgcatacttataaagttttaagaatagcgagtcctctgatgagtatattctcagctgatctcaaacaagggtgtggtctaccattgtttcagctgatactactataattgtatgctgttactcggggctctgactcagtaggaaacttaccaaacaggctatctcctacctctagaaaatactttgttaatgagaaattattcaaagctagtcttatcttaaaatttaggcatttgatacttctatttcttcttattcttaaaaggattcttagtggatttcacaaaattatcctgatgtcttaatatgcctgtaattgtttcaaagtcttagtacactatgactaaaacatatggcaagttgattttacgtaatggttactaagacagaaggtact

SEQ ID NO: 49284 - DNA, 352 bp, Mus musculus
  source 1..352: mol_type = other DNA
atgattgttcctcatcaaagaaacgcctggaaattcgttaatttgcttgaatttcaaacagccttcctgaggaagaatgctctctggtgtgcctgtgggccacgggtagagctaaagacccacatgtttgatctgtgggtggaagatgcgagaagctcgagctggcgtttgtttcggtaccttcgagggagggaaggcactgaagctgcacccgcagccgggtggcacccccgcaggtccctccagacctccgcccgccctccatcaccgggctcctaggcggtgctagaggaggtccggccaatggaagcccgggccgcgctatgactgtctccgccccctccggggaaac

SEQ ID NO: 49285 - DNA, 479 bp, Mus musculus
  source 1..479: mol_type = other DNA
cctggcaagacaggcctttgaggtaatgaccttcccttgcttgctggaaagaatcattttcaagtccagaacaaatatcatcttttgcatttcagttgttcatttttattaacttcagctttctatatatgcatccacaaataaatatagaacacaaatgttattctttaacattttgtttgaatcacacacccagcaatctttggtacttccaaatgaccaacatgttaatgatatattagtcatgtatagttcactgtgccacagatcactccaagtggcattttttagtatgaaattgtcagatgctaaagttttctttttcctcccaaagtaaaattattcccactgtgtgatttttcttctgataacaggaataggagcatgaagaactcttgagtgagactcagatgaagatgtcttactcattcttagaaaatagttttcacggttgggttaacacagcttaaatttaaacc

SEQ ID NO: 49286 - DNA, 498 bp, Mus musculus
  source 1..498: mol_type = other DNA
aatttcttaagtacttgaaaagcaccactgtttctgtgactatttaacaattgtcccctgactttaaaatatacagaaaagaaattgtgagattctataggattcccaaggtctgctctgccgggctatccacagctgagcatctacttattcacatatctcaatattttcatgaaggaataatgttatctacgtgtgggtggatatacactgaaatgatcacaaatgtagatcatttatatgcgagaatatgctcgagcgtgatattaaatttcaataacatgtttaagcacgttcacaattaaagaatagtgattttctttaaaggtaacaatccattttagaaaggactttgttcaaaacagttcgcgtgccacgccactcgaagtggcaatccagggaacggatctgcgaaacgcagctcagaggatcctctgcgatcgcccccagctggccgggcgcacggggcgcaggaggcgcaggaggcgccggatctcc

SEQ ID NO: 49287 - DNA, 296 bp, Mus musculus
  source 1..296: mol_type = other DNA
cagctgagcctcatctccagctcaaactccttgtttttgaaagaaagaatttcctaattcttatctttgcaaataataaggaaaccttctttcgttttagaagggactgatgctaagcattgctttgctggcatgtagcctgagtttacagtctagtttccacatgagtctcagttgtaaaaagtggtgtatgtttttcagtgaagcaaaaaatgttttttaagataaatgattgtgtcaacttgttttgccatagaggaacttaaatgttacaaaggtacagtattttaaattgc

SEQ ID NO: 49288 - DNA, 283 bp, Mus musculus
  source 1..283: mol_type = other DNA
gcagcaagtctcaggctagcctagataaaaagagtgtcatgagacattgtaaattcataatatattctatcctttttgcatttttcagaaaaatatacatataagaggtgtgtaacttatacacaaaaagcttacatttccacacgttaccttgcttgggaaacaagccacatatctgactttcagagggagaggtgcttagaatagtctcccaaggaaagaactgctaggattgttttattggttattgcataatgacactttgtcaataagggaaaatagc

SEQ ID NO: 49289 - DNA, 424 bp, Mus musculus
  source 1..424: mol_type = other DNA
ctatggccaggccattgcagaagagaccctccttccagctgcctggaagacagtctctgcatgctaccatgcttcctgctatgattcctaattaaatgtctgcctttataataaagagttgccttggccatggtgtctctctatctaagacaacataacttagttattttacaagtgtgcacagtaattcaattttatttccttcactttaagccaatcatgaaatttcacagtgattttctgaaggaaggcgtcattcagcatgatggaggccgtggcccggctggcctccccctcggcggcctccagcttccgcagctcgatcaggccgtcgcctgccgtggccagcgagttggcgatcagctcagcggcccctcagcagagatgatggctaggtcagatgtatcgctcacctgcctggaga

SEQ ID NO: 49290 - DNA, 271 bp, Mus musculus
  source 1..271: mol_type = other DNA
taaaataaattttgtcagatcctgagtaattaaacttaatgagcaatcttacagagagttctggaagccagtccataaatagaacaaaatggtttaatattagcagaaatttggaccaatggttgcctttaagagtaagggactcatttcctcatcccttgggtacagaaaccataccggtcatagacttgctggtggctcgattcgatgctggagaattgattacccagcgagagctggtctccaggcaggtgagcgatacatctgacct

SEQ ID NO: 49291 - DNA, 600 bp, Mus musculus
  source 1..600: mol_type = other DNA
aggagacaaaatatcctctcattaaagtaatctagcttaagagacaggacgaggcgcccagcctcctccccgggctccgggagaggaaaccctgtcccgggcctccaggcgctggcgcgcgccggggaaagagtcccgcgctcgggcgagcgccctgcacgcccgctttcacgtcggatgcccggcggaccgaaagcaaacctccgccctgccgcccagctctcggcggcggcggcgagcggctttgcctgtgatcaagcgcgaagccgctacaaactttgttcctctcttttaataataataataaaaataatggtaacaattttaggggagtgcggcggggcgggccagcaggtggcccgcccgcatcccgacctccgccgcgcgcgcgcccagagtcccgggccacatcaatgggcgccccccccccccgtgggaactgcgcctcccatgcgccccgacgccctgcccgtgtccccccgccgggggtcgcatcccaccgcccaatgcgggtcggcacaggcggcggcgcgttgctcggcgcccgcgggcgagcctccgtgccgaggggcgggggcgctgccgcgggaggggtcgcgc

SEQ ID NO: 49292 - DNA, 304 bp, Mus musculus
  source 1..304: mol_type = other DNA
ggagtaggtagtttccaaatgtgaactgaactatagcttggagcaactccaggcttcttggcctggcgactggtgggaacttgttgccacacctcctgccacacagggcgtttccaggtcctgtagttcatagatctctgttgatccaacagtttgtcaggacacctggcacggggcactgggtcgcagctcgtccccttcccccggtgctgcccgcccggtcccgggaaccgcgcccgtcgcagggtcccgatcggaccaggagcaaattcctgtgggtcccaggcatagctggggcgcgggg

SEQ ID NO: 49293 - DNA, 490 bp, Mus musculus
  source 1..490: mol_type = other DNA
agccatgtgactgcgtgccagtggctccgtctggcacatttctgaactttgcaaaattaattgtgctggaaaaatctcaccccattaagggatccgtttcttcttgcccccgcaggccctcaggagctgagaggtcccctcacggcttgcaaagtgcaatgacagcggtttgggagccgcgctgcttcccgcagggccgcctgggctccgctggcctttccggaggctttgcacccgcagggccgctgcgctctcgcccgccgctcggtgaccttgcaaggctggccgcgcgaccggagtctcggcagaggcacctccctgggcgccgggcccgcgcgcgacccagaggctccgactcacgcgcggcctcgcgggcccgcgggcccgcgtccccgtgcgcgcggcagggacggcggagaaggctgcgggggcgcgcggggcggggcctgggcggggcctgggtgctgcgccccccgccgagctcctcgca

SEQ ID NO: 49294 - DNA, 534 bp, Mus musculus
  source 1..534: mol_type = other DNA
taatcatcactgagggagggattgatttcaaactcttttcctgagtcagaagttaaagacgttgttatagtttttattactttgatctataaccaagtagtcagaaaaataacatgttcatcttattagcctacatctacagctgtacattgttagaatttgaactatctttagagtacaatagacactattaactaggctagccagggctatatatatatctgtctcaaaaaataaaaataaaaaaatggaactattttttaaagttaatacagggaaagtgctttataaaaactgagaaagcttggagacaaattcttttaaagttttagtctcacttttagaggtaactgcatatgatatgatatgatatgatattacattatacatgatagattaatttctgtgcataaccagacattgtactggctagttttgtgtcaccttgacccaaacacctccctaagatcgagctgtggggcagctgaccaatgggggatggcccagcccatttgtgggtggtgccacccctgg

SEQ ID NO: 49295 - DNA, 415 bp, Mus musculus
  source 1..415: mol_type = other DNA
tggggtcagaaagccagtttgctcgggagctcacacaggatctcttgggaagggagggggtctttcctcagctagggagctaaatgctggctcccgcattgcccagtcccggcctggccgcaagcggggagggggggtgtctaaagttgccacccaccaccagaaggggacctggcccccaggcaccagtcccgctctacagagtagggttaggatccagccgaggaccctgggcccgcagtctgagtcaaggaacaccgggcgagtgtcgaagtcggtcccaccccggcccccaatctaggtcacccgcggggaagggctgagctggggaggtgggcgcggagtgaattgattcagaccctgctgcgggtcgagccgccctccctccggcggccagtgcgtccccgaaaagcct

SEQ ID NO: 49296 - DNA, 332 bp, Mus musculus
  source 1..332: mol_type = other DNA
ctctcaatcacagtaagttagaaagtggctgaaacctatgtggatggttcagccatatgcaaagggtgcaagagcctgtcctcctcttgtcctctctcctggcttctggtgttcagcaccaacaggagaaaatgcagaaaaaggtctgtcctctcccccttttttcagagcgctagaaggaaggctgagaataactttttcaaaactcttgaacaaaggctggtattgtattacaaccttcttcattgccggccatgtaatacatgatatgcaaagcctctgacttcagccagcagatatttggaggactaaactaatgtcagtgagagctc

SEQ ID NO: 49297 - DNA, 425 bp, Mus musculus
  source 1..425: mol_type = other DNA
cttctttgtactaataaatttttcttttactctaaggacaatggaagcattagataatcattatcagtaattttatcaaagaattttcattcttaccacgtccacaatcattgagtgcatgtgaaaatgaagtattttcacttggtcaaaagaaaaattcaaccaagtatttgttttagactttaaaagtatattaaatgatgtgtcattaaggtagttatgtaacatgtggctagcctaacaactcttcagtcatcatgtacgtcaagtacattacgaatatagataaaagtagcatgcaaataacaagattctgttgatttccttagaaacgtgccagctcgcaccgctagggggcgagagtccgaaagcctgcctacccacgcagccgggccgctcttggcgacgcggtctcggtgacgaca

SEQ ID NO: 49298 - DNA, 191 bp, Mus musculus
  source 1..191: mol_type = other DNA
gacagactctcaagtttactacaaacagtgtttctctgtgtagccctgtctgtcctggaactcactctgtagaccaggctggcctcgaactcagacgctgtgagtctagcgatcaatttctaactactgttagaagttatcagccgtcccagaagcggcgtcttccagtgccggggaggacgaaccggaag

SEQ ID NO: 49299 - DNA, 477 bp, Mus musculus
  source 1..477: mol_type = other DNA
ctctcgtatttcagccaggctgggagtcttcacctccgaggactgtgttcttcgcagaaaataacccagacggccgctcccgggacgatccgtcggcatccaacccgccggcagcgggagctcggcttccccccggggcccggggccggccagtcagggagagcagcgcggcctcggctggccgccttctccgggctatgaggcccggagcgcctgccggcctcacgccaccacagcggaccagcgcccggctgctgtcgcctcgagcgtagaagcatccacggccgtccgttgcacaggacaagggcacggagcagaaccgccgctgctgctcccgctgcctccgccgctgtcgccgccgccgccgcgcctccggagcccgcgggagccggcgcgctgaggcagagctgcgagcccgagtggcggcggcggcggtggcggcggcggccggcggagggagtcattcctgcagctgca

SEQ ID NO: 49300 - DNA, 502 bp, Mus musculus
  source 1..502: mol_type = other DNA
agtgcgccggtgccggggctccggtgcccggcgtcaggatggcctgctctcgtatttcagccaggctgggagtcttcacctccgaggactgtgttcttcgcagaaaataacccagacggccgctcccgggacgatccgtcggcatccaacccgccggcagcgggagctcggcttccccccggggcccggggccggccagtcagggagagcagcgcggcctcggctggccgccttctccgggctatgaggcccggagcgcctgccggcctcacgccaccacagcggaccagcgcccggctgctgtcgcctcgagcgtagaagcatccacggccgtccgttgcacaggacaagggcacggagcagaaccgccgctgctgctcccgctgcctccgccgctgtcgccgccgccgccgcgcctccggagcccgcgggagccggcgcgctgaggcagagctgcgagcccgagtggcggcggcggcggtggcggcggcggccggcggag

SEQ ID NO: 49301 - DNA, 301 bp, Mus musculus
  source 1..301: mol_type = other DNA
tgatcgataaccaattgtgataaatccttcatgacatgtgaagaattagccctggctgtcctggaactcactctgtagaccaggctggcctcgaactcagtgtcttcagacactccagaagagagcaccacctttgtagctggtgcccttaacagcgcagatctaaatgtcggtggaggtaacccactctggcaggcttgcagcgctctcccagaaccccggcgcaaagctggctacgccgaggaggcggggcgggcggggatccgtcaggtgcccgcccacggagcggcatggagcatgc

SEQ ID NO: 49302 - DNA, 251 bp, Mus musculus
  source 1..251: mol_type = other DNA
caattgaatagccctttggaagtcatgagtgtgcatctgcactcttggtcttaaaacagagtttacagttttaaactgtaaaacaggggcatgtctcaccttgtgttttgagtaactttatacaagttgctcctctctatacttaattgtattcaggatccttccaagaaagacgtcccctgaaggggaggcaacctgaaaattttgcgtttctaatataagtgaactaaaatattccggggagctcgggc

SEQ ID NO: 49303 - DNA, 284 bp, Mus musculus
  source 1..284: mol_type = other DNA
ttcttaaaactgaggagagaggggtaagtcactctcaagtccgttttccttttaagaaaaatggcaaaaagctcctagcacttcaattgaatagccctttggaagtcatgagtgtgcatctgcactcttggtcttaaaacagagtttacagttttaaactgtaaaacaggggcatgtctcaccttgtgttttgagtaactttatacaagttgctcctctctatacttaattgtattcaggatccttccaagaaagacgtcccctgaaggggaggcaacctgaaa

SEQ ID NO: 49304 - DNA, 524 bp, Mus musculus
  source 1..524: mol_type = other DNA
atgtgtgtgcgtttgtgcacacacatttgggtttggatacatgtgtgactgtgtgcattgtctcaggtgtgagtgtatgcctgggtatgcacacacaaacatatgggtgtgagagtgtagatttcatacttaactttatattcaaataaaaaatataatacaaaaaattcatttgaattagtcacaagaattacaaaggtgaagtgatatatgcatttcatgtgttttcagaaatgaaaatatgcttgggaaattgtcaatacaagaagagacacatctccctgccttctagatatcataaggaggcaaccttattagggtgagcagagcgtctcgctcagagtcacgctgcaaggcaggacctatgatattcattatgacagctgccttgtctttcctggagcctcggagctgtttacagagcatgcgctcctgaccagatccagctggatcttaactgcactgcccaagccctgctttgggcttgggctttaatgacaacgcagcagaagcaaggctgtcca

SEQ ID NO: 49305 - DNA, 364 bp, Mus musculus
  source 1..364: mol_type = other DNA
accttattagcagagcgtctcgctcagagtcacgctgcaaggcaggacctatgatattcattatgacagctgccttgtctttcctggagcctcggagctgtttacagagcatgcgctcctgaccagatccagctggatcttaactgcactgcccaagccctgctttgggcttgggctttaatgacaacgcagcagaagcaaggctgtccatctctacactagagggagtttcaccgagagacgtcgtttctttttgaacattctaaaaggggaaaggtctttaaaatcgtgtttccagccaaataagctggcatctttgtactgcagaattcttgaccagtagaaaccctggcatgcttttcga

SEQ ID NO: 49306 - DNA, 209 bp, Mus musculus
  source 1..209: mol_type = other DNA
gacctcagggcagtggccaccagatcaataatcatcaaacactgctcaaagtgcaaaacatttttaacaagccgtttggagcgaggtcaccggaagatgcgcaagaaacttgctttccccagttccaactggatttcttcgggcagctcgaaagccaaatagaatgacagatctggcccgggggcgggcttagagcggcctccctgagg

SEQ ID NO: 49307 - DNA, 346 bp, Mus musculus
  source 1..346: mol_type = other DNA
agatcaataatcatcaaacactgctcaaagtgcaaaacatttttaacaagccgtttggagcgaggtcaccggaagatgcgcaagaaacttgctttccccagttccaactggatttcttcgggcagctcgaaagccaaatagaatgacagatctggcccgggggcgggcttagagcggcctccctgaggtggggccgggccgagaggccactgcgcaggcgcctgcccgggggccagcccggatccccgcctcccggggcctcccggggcctctccgccctcgcgtgcgtctgggcacgtcccccccccccccggcgcgttccacgcacgtccccgcacttaacctg

SEQ ID NO: 49308 - DNA, 547 bp, Mus musculus
  source 1..547: mol_type = other DNA
cttcagaggctaaattagcatagtttctaggcatcagggtggtctctccttgcaagcggagcctccctatttgggagactcatcaaggatccaagaggatgcacgcgggaaccactgctggctcctgctcctcttggagctgcgctttagctcccgcccactgccaggtggaggaaggcgaatggcaggagtgccacccgcagcctctcacctggcgggccatcgagaccccggagatgggcctggcggcggcggccacccgccagggactgggccgggaccccagaccctgacgcaccccgtcggacctcgccagacagcgtctggaagggactcagaagcttcgcgtccgccgcagcctgccggggtcacggatccttcagtcccgggcgaccgtggcggtgatcacccgaaggcccgtgagctccgggctgctcccagtcaatcggctgacatttcccagcttcaatcccgcccggcgccgcagggagttgtgagctaggctcggaactacaattcccagcaggcaacggggcgtcagaaggcg

SEQ ID NO: 49309 - DNA, 397 bp, Mus musculus
  source 1..397: mol_type = other DNA
tggaatcccatccccacgtgaagctggtggtgacgttgcctcctgaaggtgcttcctgcagaagggcagacattctagtactgcatttttttttgaaaggctttgggattaataatttcttcccgtggagggaacttaattaggaagccaaattaaactccacattgatttatttaaaagaattcaaacggttcattcatgttttgtccggttcaggagttttgaatgcttgaattaattgaagcatccccggggccccagcagttggacccgcaccgcgcgcgcggagttctgcatcccgctctccagcagccgccttctgacgccccgttgcctgctgggaattgtagttccgagcctagctcacaactccctgcggcgccgggcgggattgaag

SEQ ID NO: 49310 - DNA, 540 bp, Mus musculus
  source 1..540: mol_type = other DNA
aatgcaaacgtgggtttacagcaagtaagtgccgtaatagatggcattctcaatcagggctgttttgccggtgatggagaaacatcatcaaaaactcaactgtgtagctgttgaatctaaacaacaaatgttttatgagtaagtacatgttactactgaatgaactatgatagatgatttttttttttaatattagattctgggagaaagacacgcagactcaagcagcatgagtgacctaaaactaggccctggagaggccagggttgtggtataactgtaatcttagcacgcaggaagagttctgactctgagtaaataataacattattcctttagagtgactttgaaatatattacaaagaatgagaaaacattggttttgttttcaaaaagcacaggatttcaatgtttggctggcaagcattgttcttcactgaagaaaacactttccaatgtctggtttcctaaggcttcccatagaaaactcaagtgtgctgatttgaatatttgaagtcataaaggagtgacactgtttaa

SEQ ID NO: 49311 - DNA, 464 bp, Mus musculus
  source 1..464: mol_type = other DNA
cctaatacatttgagaaatatgagtttttgggggaagaacactgcagtcctcactgtgaattataccagagtatcatgcttaaactcaggcatagacagagcagaattcaaggctgtattctgcatgcttggtaaatacagaggcagattctaactgcactgacagtggttttacaatgactgctcggggcagtgtcctgttctgtttcatgaagcattcagaattggaggtttaacattttttcttctgccatagtaagacatgtcaagcaataatcttgagtgttttccttgaagatgactaggcttgtaaaatgtccacccactttagagttttttgaggctaacaaggaaaatattgtgattttaggacaagttaaaaattaactcttcacctgttttttctttcaacactagttaaggagggtgaaacagtatcatttggaaaaagaatataaactatt

SEQ ID NO: 49312 - DNA, 381 bp, Mus musculus
  source 1..381: mol_type = other DNA
gaacctcaggggaatcagattctctttgtgctttgactggagtgtgaagatgactgctcggagcagtgtgctccttccttcattgttgatttacaagtaaacagatctggactccacaggcaactagcacattttcatgcatctgtgactagtgagagatgtcaagcaataatcttgattgctttttaaaaccggtacccagggtgactaggcttaaaaaatatttacgatatattccactttaagatattctcattgacaacattcccactttagagatatattgtggcagcaaagaaatattgtggctataagacaaattataaaaacaaaacgaaaagacaagttatgtattaattctccatttgtttttcttagaac

SEQ ID NO: 49313 - DNA, 365 bp, Mus musculus
  source 1..365: mol_type = other DNA
gattattaatgttgaataaatctcatttgatgtttatgtcaaatctcagaaattatactgttcatttgaatgatattaaaaatcaactaccacacttgcagaggcctttctagaaagttctgttccaaaatgtggcttaatttactcccaaagcaaacaacaagcctgcttttgctctggcaaacatattatcttcttagtgtgttccttttaaaacgtgggataccagttttgatgctgttttaaaaccaaacaattgcacttccgcctaccatttcttccagaacaaacagcttgttgggttttcacagtcactgggatttcctaggtaaaggctatccaattagaactgaaagccttgaaag

SEQ ID NO: 49314 - DNA, 408 bp, Mus musculus
  source 1..408: mol_type = other DNA
ttaggataaataaataacttaatcaattcttaaaatgatttaagaaaaggatccacagaacctacttagttcagctcttgtgctcatgagtgtatatcaacctgccaggagggcctcagctccatattggaatgtggattggtgtgatctcatgccagtcttgtgtcacaaccatagcttctgtgaaattatgaacacaaagatcctattatttttataatagataatttcactgtattgaccacgagactattgtttgtttaaaagacagagtatcaaactgtcttctagacatgaagctcttttctcacttctctctcagagagcagagaactgggcgtgaccattgagggttcagccctaagattggaccctgagatcatctgaagcatcacttggttaagttca

SEQ ID NO: 49315 - DNA, 373 bp, Mus musculus
  source 1..373: mol_type = other DNA
ttcttctattaagtcattatttccggggcaaagaatttgtgaaatcaaagccagacaggatggctcacataaattattgatagtaaaaaaaataaattataaaagtattacaatgaataatttagagaattgcttttattgaacaaattacagttcagtgcacattatttaaataactctatatagtctatccttggttatttacagaagagaaatcaaggtttatagtcaatgacttttttttttaagaaacctcttattatttttggaaaatacattttattttttttttccatatttagctcatttacattacgggggcacacaaagtctgcgtgtccaatggcctcctctctgagccggcgaactggtt

SEQ ID NO: 49316 - DNA, 429 bp, Mus musculus
  source 1..429: mol_type = other DNA
tgatttgccagttattgtaaagtgtcaatcaaatcaaagcaatgtttcaatgattaaaaaaaatattcaatagcttgttcaaaagcatcacttacctgttcagagataactatttgatccaagtagctattggtatttgttgttttaatagtttattttcaagagagtgttttgttaataccaaagacataatataaaacaaccctcagatggtgcagcttatttgaggaggtacattctgcattagaaagcaacgcgtcctttaagggtccctgtttcccagggaaggtgtgcaagcggcatctttgaggtcacaggacttaaaggacatttctattagcacgctggagaaaaatcactgttttgcctccagcaaggaacatgcatgttgcaacactgactcctcctctagtgaagaaagagtgaaca

SEQ ID NO: 49317 - DNA, 216 bp, Mus musculus
  source 1..216: mol_type = other DNA
agtgaaatgttctgtatatatctgttaaatccatttggttcataacctctattaaagtgttgaagtctcccactattattgctgattttcagttgtcactgagataggaccaccatagtgagtcttagaatgtcatttcaacgtgccctggatgggatgaacacatgctcaacccttgtaaaaataaataaggtatgttgattttttgtgcagatg

SEQ ID NO: 49318 - DNA, 202 bp, Mus musculus
  source 1..202: mol_type = other DNA
taatggcccattaggtttcactgacaacgttcattacagcagtgatctctctcatctgagaaaggcttattttcactcatcggttgaaagagtgcatatccaacacaattttggacataaactctgtgaccccggggggagcaggaggcctgcacaatgagcaaacattgttctgtcttatttaaggtactattcctaataa

SEQ ID NO: 49319 - DNA, 475 bp, Mus musculus
  source 1..475: mol_type = other DNA
aagtaggagcctgactaattctggtttcttacagactctatgatgatgagcaaccagtattatcaagcaaggatgataataaatactattacagactttttatgaagaacctgtagtttatataaatacaaataagtttttccgtaactgatggtaaattccatctttatggacgatattatgttcaatactgtaccacttagtgttgaggaagtctagatttcctagttgataggggctactattatatatggtatgagaaattgcaggcatgattttaatctccagttcctgaaagacttcctggtttttaaattgttttaaattatataattgcatttaattccgagaggccttacttaaaggagggagggtaagataggaaaacttctactttctcctcaagtggttaagtacaactcaaatgtggggctgtcctaaaattgtatacaaagtgaatgcacgctcagcacta

SEQ ID NO: 49320 - DNA, 493 bp, Mus musculus
  source 1..493: mol_type = other DNA
atagccctggctgtcctggaactactttgtagaccaggatgaggtcttgtcttagcaaggctggatgttaagacatttcacaaatgacttattcttaggaagagtacttgttatgatgtggacattttctgcttaatatatgtgtaaaagatcatgaatttaactcattattcaagcaggccttgaattcacagataattgaggtggaggctgggacttcataccgggcacctagcggtacgctacctttaagatgctttaaaaactgatttaggcaatgaccttatttactgtcccttattatgcattatcaggtgtttccaccacgaacttctggctgaaactctgcagagaaggtccggaaggtacttgccctgccttcaggccggctaggagtgccacgtggctcccccgcccagcctcccctgcccaggccccgcctccgcggcgcgccgctcccccggaacccagcccagcccccgcccatgcggag

SEQ ID NO: 49321 - DNA, 411 bp, Mus musculus
  source 1..411: mol_type = other DNA
ataaactatcactagtaatcgttaaggaaagaaaaaaaagtaacgacattttgttcactaacttgagttttgttgaattaagtccttccaaattcattcattagggaatgctttaaaaatgtcttcactcccccatacctgaataaaggcatttgcttgtttttggtagcaaaacacgtggcgtgttctctgaaatgaatggctttcaagacagtggagagacggtccacggtaccgtcggctccgagaagaaggatgctcctcttccggaagtctacacaggcgcgggtaaccgggcttgcttagcacctctgagcgccaccaacctggcttgcagggcttcggcccgctcgccgcacagcggccactaagggagcccctggcgccaggctgtgggtgacgtcccgtgtg

SEQ ID NO: 49322 - DNA, 394 bp, Mus musculus
  source 1..394: mol_type = other DNA
aacctgctggcctttagaagagacacacagttttctatgaagccttctttctttctggaggaactcttggtataagtgtgtcgcactgtttgacacagtaaaactagtggtctaggacccttgagttaaaagatctaaccaaacaagtcagagtcacagactcacaggactgtagctttaaagcttggcaaataaataaataaatacatacatacatacatacatacttcggtaatcctctgttaactggcttagggtctacgaactgctgtctccaggaagaaggccatcagcataagatcctgtcaagttttgactggagtcactggcccaaaggtgggtcagagcgccgactccaacttcgggagtcgagctggctgcctcgccgcgtcgg

SEQ ID NO: 49323 - DNA, 266 bp, Mus musculus
  source 1..266: mol_type = other DNA
ttcatgctgaagcttctcttagaaaccagagaagttaacccttgattgaaaggctttcttgacattctagagtcagtgatgaatttccatgcaaagcatacaaaataactgtgaattgcttttctcttctttttaaaacaggagggacttacctgctcagttgttaagataatgaacatgtattggcccattcctgaagccaatcattgctgaatagacatggcagttttaaaaccatcaggcccctgaagcctgcagcaagaaaa

SEQ ID NO: 49324 - DNA, 452 bp, Mus musculus
  source 1..452: mol_type = other DNA
ggccgccgcgcggcgaggctggggtgcgggctctggactcggtccccgcctttgtgtctggggctgcgcagagctccgggcgccgagaggagcgggcgggagtctggacagagctttggccgctcactgaccagaggacgctgtggctgcgcccccggggcagcccgtcccactttcgtgccctgccccgggtccggtgccccagtgagagacgcccggtggctctggagacccacagtccgctattgttcctttacggactcaagggagctggtgagctgtctggagggcgcaggcgagaccaccctgggcctccaccacagctcctaggagggcagggattccaagctgctgggcttaggtcggcatccttcgcgacccgtccgggagggcaagcactgtgacttaaagaggcaggggtgacctcacagaggcctgagctttatataaag

SEQ ID NO: 49325 - DNA, 581 bp, Mus musculus
  source 1..581: mol_type = other DNA
cctgccctcctaggagctgtggtggaggcccagggtggtctcgcctgcgccctccagacagctcaccagctcccttgagtccgtaaaggaacaatagcggactgtgggtctccagagccaccgggcgtctctcactggggcaccggacccggggcagggcacgaaagtgggacgggctgccccgggggcgcagccacagcgtcctctggtcagtgagcggccaaagctctgtccagactcccgcccgctcctctcggcgcccggagctctgcgcagccccagacacaaaggcggggaccgagtccagagcccgcaccccagcctcgccgcaagcggcggcctcagctcctggccccgctggccgtcccgcccgccgcttccccaggaaagtgcggctgccgggctcgcttcctcctcccgacgcggggtcagtgggcgctcagctccggggctccgccggcagggcgggggcaacggcagcaccaccacgtggccgccgggcgccggcccccgacctggatcccgtgggctccaggagggagttgctagccactcccactccgcgcggccccaaattccgg

SEQ ID NO: 49326 - DNA, 471 bp, Mus musculus
  source 1..471: mol_type = other DNA
accaacacaactaagttttgtcttacacctgaggagtgttaggaaacagtcagaaaatgtaagtacattctggtttactttcttttcgttcacactggaaatggaaccgatctcagtctggttcagagtacagataactttggaaactgaccagaaacaagtactttttccggatctcactaacttcaagttaaggtgtgagacgtggacgtccgggacgcgccgcgggccggggcgtgggcggtcgcagagcacctcccgcaggtccagggagcagctccggggccaggtcacctgactcccggaatttggggccgcgcggagtgggagtggctagcaactccctcctggagcccacgggatccaggtcgggggccggcgcccggcggccacgtggtggtgctgccgttgcccccgccctgccggcggagccccggagctgagcgcccactgaccccgcgtcgggaggag

SEQ ID NO: 49327 - DNA, 302 bp, Mus musculus
  source 1..302: mol_type = other DNA
accttctgaccatagtgatctataaatcagagcagtataatcacaaagaggttaggagtatccttttgttctttggtttaatcggtaaaagcacaggaacggtaacaaatgatagagttctctcaaccttgatacaagaaagtaggttgtatttccatctagcaagaacttagatgcaagaaacatctggttccatggccttgaatgggatcctgctgtgattgcaggaactgaacacacactctgtttccagccggctgtgtacgactgtctggagagccgctgtcactctggcatgactg

SEQ ID NO: 49328 - DNA, 370 bp, Mus musculus
  source 1..370: mol_type = other DNA
ttttccattccagtttatcaaaatgcaaaggaaactgctcattctgagagagcacaggttaaaagtgttttggcttcagtgctgcatgattattttgttgcattttaaaggctgaaaaaagtttctaactcaaaattgtaactgtccgtaaatgaataattctgatatcccagactcttctaaatgctgggattatccgcgtgcacaacaccggcgttttaagcggtgctggactccgcgcacggatttagcaactggtctacactgggtgacaactgacacccagtggttgccttcttacattgatctaaggagttgagtgccaggaagtgcgcaagcgcgcagccttcccggacggggcggggcgagg

SEQ ID NO: 49329 - DNA, 232 bp, Mus musculus
  source 1..232: mol_type = other DNA
tccttggttttcagtagcccttgaaatacaataaaaagaaaacgcttttttaaagtgactgcgctatattaaaactgatcgaaggttttttttctctattggtaaacccttttaaagtccactttggaattaaagtattatcccagaagtgagggcaattactgcatgcgttcttctgtcaagaaaacacttcagcttccttaagtccttctaatttgatttaaagaacaaa

SEQ ID NO: 49330 - DNA, 329 bp, Mus musculus
  source 1..329: mol_type = other DNA
gtggctactagacaactactagattcatagtgggcattcagtcaatgccaaaaatatctcaggatgaagaaaattgggacatactgtccaagtatgcctagaagccagggagctacaaaacagactgtatatactctattcattcaacctgatctctgtcctgagatgaattctggaaaacagaatatccagatctatagagagaagtttatagaaattattggattatttacatttttagttagtctctgtctaaggaaactttatgatttttaagctatgaaactaagaggtgtacttgggctcacagaaagaatttcagcctggtt

SEQ ID NO: 49331 - DNA, 290 bp, Mus musculus
  source 1..290: mol_type = other DNA
tccctggacaatatgttcctctgaaagccgggctatacatacagtgagaccctgtctctattgcgcagctgctattaggaactttctgctaagcattttgcttaagtaagtttattccttcaagtaaaaagttaattttatctagacattttctcatgaggaaggctgagtcatcttctattggccaaggaaagggaggacccgcctctccgcgtagcccattggcctcgtgtccaggtagggcggggccaggagtcccgttgcatcagctggttagctggttccgcctg

SEQ ID NO: 49332 - DNA, 194 bp, Mus musculus
  source 1..194: mol_type = other DNA
gctgcagctgccactctgcagaggaagagacttgtttcctgtgtgacttggcaaagagaaaaaaattgcttattagttgttatgagtagggtcccctctgcccgcatgcccaggctctgagcccggagggaggagcttgggggtgggctgagccccttggctctgacccagtccatgctctggcccgcaggaag

SEQ ID NO: 49333 - DNA, 444 bp, Mus musculus
  source 1..444: mol_type = other DNA
tctcagtgaccccgcggaggggctgcgcactgggacacggtgacgctgcgcccactgtgattctagcgtgtcccagcagcccagagggaggagggcacccacgccgggtgggggaaggagcggtgcgacaccgtgcaggccagatgggcttaccagcgcaccaggaccttgttccttgttccccgaccttgctccagggaccagaaaggtcaggtgcgggacaggactgggcgcacccagacgctttgtgtatgtgcgcgcactcatttctttcaaacatatatacacttttttttttttttttttccgcgaggtctcccgcgggtgtagacgtgggcggttgcggctttgggccaaatctgagcacgagtagggggaggagcctgcagagacaagcccggcctcggcgcgccatgtgtggtaacgcgctgcgccgctgccacg

SEQ ID NO: 49334 - DNA, 401 bp, Mus musculus
  source 1..401: mol_type = other DNA
gctttgtgtatgtgcgcgcactcatttctttcaaacatatatacacttttttttttttttttttccgcgaggtctcccgcgggtgtagacgtgggcggttgcggctttgggccaaatctgagcacgagtagggggaggagcctgcagagacaagcccggcctcggcgcgccatgtgtggtaacgcgctgcgccgctgccacgacttggacaagtttaacttttttttttcttttacaaataaggagggagaatatatatattgataataagtctatatgtatattacagacgcacaggtttacataaaatttttttttttaaacctaggttcttggagcgcccaagggggcgcagggacagggcgagccggcggccagggcgagcgcttgctggcaacacg

SEQ ID NO: 49335 - DNA, 417 bp, Mus musculus
  source 1..417: mol_type = other DNA
tcaacccatgacattacttctgtggagaaaagtgttcatctgactcaccgagcaggggtggcacacaccttttttagctccagcccagcctgatctacagagctagttctagaataataagcaaccattttatcatgtttagaaggtaaggattaggcttattttagagcctaaaagcaatgctgaattattaaaacaggactatgaataaaataagcaggtggtaccccattgtttgtctgagtgatgaaaaaattttatccaaggtctgaccgtggctttgctgccaccttctggcaaaaaataatttttttaaattttcagttcatctactaccactaaaaatgaaatttgttaaaaacttcttccaacacataagaaaattccatttctaaactgtttttaatactgagtgcc

SEQ ID NO: 49336 - DNA, 340 bp, Mus musculus
  source 1..340: mol_type = other DNA
catggttcgtaataatgctgtcatattatgactatcagagcattaattcactgattaaggcacagctctcagctcttctgaaaaggtcatcagttgaaaaccagtggagccccagaactccattttaagaataaaggtttcgtggctaagatttcttagcatttatagagcggtaccatatacaagctatttgcaagcgcaaagctgcccaagctgcgtggcatctcactgtggtggcggcccctttaaggccctggaaagggccggctggcggttgggcggcgaggccacgcccccttcacgtggccttcgtgccattgggcggagccagggcctctaa

SEQ ID NO: 49337 - DNA, 300 bp, Mus musculus
  source 1..300: mol_type = other DNA
tagctattggctctagtgtgtcataagacttcccagaacaaaaattccatgtgaacagggattttgttacaacgcccaacaccttgttgggggccgccaacatgaccctgaaaggctcgcccctttccaaaggccagtgacaagcaagctgcccgactcccccgcggccgagcgaggcgctcttcctccgccttgtagcctccctgcagcgggtgcgagaatccgctcctcggggggccctgcgccagcccccgggtggggggtgggggggttggcgcatcgcactagcgcgcttgcgcg

SEQ ID NO: 49338 - DNA, 414 bp, Mus musculus
  source 1..414: mol_type = other DNA
ttttaaaaacttgaaaaattaactgcaaatgtttattggcttttcacagtagatctgcatcgtatcttattcttctaacacaatgcaattcaagataagtcttaagggcttttgatatcttaccagtgtttgaagttgaacacaacatttggcattctgttcagcaagctgaatttcaaagctgctggggcgacattctcgctacccggagagaacgctctccgcattggctagagcaaatacctcggccaacaaggggtgggcgtggccagtcccatgctgtgggcgggacctcagccggagcagagcgagcggcggtgggcgtgtcccacggtcgctaggcggggcgcgtggcctgggcggagcgaacggtgtcagcggcggagccggatgcgggcggtactgctgccgccg

SEQ ID NO: 49339 - DNA, 139 bp, Mus musculus
  source 1..139: mol_type = other DNA
agcacactgcctactgtgtgcacgctcactttttttttttcaaatacaattatccgataaaactgattttcatcacactgtaaggatcaacttggccatttatactgcaggctggatgtccaagcactttatctatacc

SEQ ID NO: 49340 - DNA, 390 bp, Mus musculus
  source 1..390: mol_type = other DNA
ttttttttttttttttttttcaggaaaaagggaaggtaacctactgggacttactgtccccgtatggttactgtttattttaaataatactggacagaggctgtcctaacagtacagtgcgccctgaccactttaaaagttttacaaacacaattcgtcaatttgtttaagcccgagtgtagatgactccttttgaaactcgggagtttcacccccagggatgctgaggtctcagtggggtccgccctagcctggcctcggcttctgggatccaggagagatctcactggtcgctggcgcccgccgaagtgggaggcggctagccacgccccccgctcgcgccgcttccggcaccccggccccgccccgcgccggcgctgccacatcctc

SEQ ID NO: 49341 - DNA, 514 bp, Mus musculus
  source 1..514: mol_type = other DNA
tactgttctgcagaaaatgtcaaaagcattattcaccaactcatgatcccgaggtttgtaattttgaaaaagaccagctttttcctctcaagacaaaaatatttgaagacttcctgaaaatctgtgggatgaagcatccaaaaagctagaggctcccgttttcccagtgacctggaataaaacgaaggagaaggaggttcacaacgtccaaatcctccatcctggggccacagctctgaggttcttaagacgcaaagaggttaagtatcctaaggaccagagcagtcccctggatcggttcctcccaggatccccaggaagccggcgcactaggactgctgtttccctgggagagcggtcctccccgctcaggggcttgctcgggggaatccccgccctcctgcaggggaatccccgccccctgggcctgtcactccgggaaggtagttcccgcccctcggatccagcagagggaaggaatccccgcccattctggaggctcggagcatccctg

SEQ ID NO: 49342 - DNA, 410 bp, Mus musculus
  source 1..410: mol_type = other DNA
gaggcaggcggatttctgagttcgaggccagcctggtctacacggtgagttctaggacagccagggctaagttcaaatcaatgaatttaatcttgcaaggtgtgcctttaagtcactgatccccaggttcaacctgcagcccggcctcctgctggatgaagagcacgttggctggtttgcatctcccgccagcctgcgaggttaagtacgggactccgggactcgcctccccccgcaagccgggcggccccgcgcctggaccacggctccccctggccgcagagctgccccgaagccacccagagagtcccggggtcgggaaaactctccggagcgcgtcgcagcaccttttgcaccgtgattggcggtagaccaatcgacattgtctagtgtcgtcctccaatccggaa

SEQ ID NO: 49343 - DNA, 251 bp, Mus musculus
  source 1..251: mol_type = other DNA
caatgctttgacgtgtttaagacttctgccttcagagaagtcacttcttccagacagctatgtgtatcaaggagtttcacaacgtcttaaatatcaatatatatcctattcccggggcgttcaaagactgacattcatgaatctgtctgctcgcgtctgtttatgttatacagaacagccgtcggtacatgtcgtgtccccgggaatcttaattgcctgggctagtcttgagccttctctggagccgtaac

SEQ ID NO: 49344 - DNA, 425 bp, Mus musculus
  source 1..425: mol_type = other DNA
aagtgggaaataacccacttttcctgggggaaggggtgtatcgcagagcttcacaggggtctcacgctgcagccagcgttaggtgctggtcaagcctctgcaggctgctagggttcgaatccctcctgccagggctccgtgtggtgatcctccaccacccacaccgggagcttggtgtagcgcctgagtcgcgcgcggtcgcctccggtgtcactcatgtctccgcgcgtctcagggaggccgcgggacacgcgggagaggagcccggctgcccgaagccgcgcgcccccaaggcacgatcgcggcggaaacgcgcgctcacccggttgcgcttccggattggaggacgacactagacaatgtcgattggtctaccgccaatcacggtgcaaaaggtgctgcgacgcgctccggagagttttccc

SEQ ID NO: 49345 - DNA, 539 bp, Mus musculus
  source 1..539: mol_type = other DNA
gcatgcatgtagcagaggactgcctcatctgccctcagtggcatcatttgaaatgtaaataaataaaataattttcaaaaagatatcaaaagctatcactatttcatttgacttatttaaaataacattagttttcaagaatctggttttgtttttgtttcagaatctgcaccagagacacacttactaattctgtgtaagtgtaagacttttcacctattttgagtagattgaatatagcttttgttattactgaacaactacttgtttgttcatttcggaaaaaagaataaaacaaatttcattcaagtatctggtttcattgacatgtagatatagctaaatatacctcactattaaggcttataacttcaaattaattaatttcataccttatattaaaagtttaatttgcagaattttaatgttgtcatcttaaattacattgaaactttcatccttctgaaggtgaagataatgaggacttacagttgtcttcaactggtcatctggacttgcattttccatatggttgacaa

SEQ ID NO: 49346 - DNA, 496 bp, Mus musculus
  source 1..496: mol_type = other DNA
tggaaccatccagatgcatcggtatcagactgtacgctgttttagacataaatacatttatgagaaaaagtttaaaagcaaaaaaaaattgtgtcaactcccaaatctgaatattttaatgatactaattatatatgtaaattattaatgacacaggctggagttctcaaattctccttatgttgcaggcatatccgtgccagagaaaagcaaagaagtaaatttttttttaatttctttttttctttttcttttttttttaaattttaattgctagaagcagtcgcagaatccgagtttgaaacagagagtctttctgccctgcgggggaggggacgcctttcatgcgcagccctcctgctgtgtgctggcaggagccggcacttccagtctctaagcgagtgctgcagctccatcagcagaacctttctctccgtgtgaggaacggcttgagagagagagagagggagagttcgctcccccctccccgctttct

SEQ ID NO: 49347 - DNA, 342 bp, Mus musculus
  source 1..342: mol_type = other DNA
taaccacatgaatttgttaagtgtgatactcatttcaaatgctatttgaaaaaaaaactagattgtacaagtcagacctctggagggctgtaataaacctttaaagtcattttaagctaggggcaaagcgatgctttaaacatgtttcaggttgcatcttccaacatccgctggagaaagcagatttgcacactgtttctaatcagcctataaattatagtcatagttgtagtaaagaccagtttcccaagtgctccgcatgctttgcctgcacgcagggggagcattgcaatttactcactgagaaacccctctgtgggtgttgaacttcgatctcctcac

SEQ ID NO: 49348 - DNA, 602 bp, Mus musculus
  source 1..602: mol_type = other DNA
tgtgtgtgtgtgttatattgtcaataaaatcacctacctacacaacctcaaagccagtatataaatagactctttgaatgctgccaattagtagtaagccttacaacagttttgatgaaattctggcagagagaaaaacacggaatgctgccaatgtttatgtatttataactacatagtcactcttccccaacagtgagaccatgcatattcccaagctctttgcaaggtcagagttctaagtttttaccaattagaaacaatttactttattattaacaatccgaaacatatttatacctttggttcatgttttcattttgtaaatatagctaaaagattctaaacatagaataaaaatgctggactaataagacaggatcttgttaccaagtcagacaatctgatcttgatatgtggcctctctgagctgacacctgtgtgtgctttaaaaaaatacaaactgaaagtcacaccatgttttaccattaggtgattaatacaattgtgtactctgattcatattactatggatcctgcatatagctagttaccatttcatattaaatgtctttctatcaggccttctaatataagggttt

SEQ ID NO: 49349 - DNA, 503 bp, Mus musculus
  source 1..503: mol_type = other DNA
tcttataaactgtgaaatatctctatctgtatagtgaaaattgtattgcttccatttctatatttttaaccagtgtatgcttatgcatgtcttaaaatttaaatatatggtgataaattatacctacacgatccatgtatgttaaattttgactgaaatgaatgctatctcaaaattctatagaatgcatgttttcagagttttagagcagaaggctgggttatttatcaaacccactcctttaaaaataggtgcctccaattacaattgaagattttctacaattataatcagaagtgttaaatgggaacttataataaagtggtatatttagtaaatgtcctgacgtgacatatcgcaagtgtgccaagataatttacttacattcacacattagactatgtagaatttattattacaaaacaaataacacttttttttgattgagtattactgctcttaattgttaaactcttgataaatgccatggcttattaaatact

SEQ ID NO: 49350 - DNA, 482 bp, Mus musculus
  source 1..482: mol_type = other DNA
ccattttctggcagcatgtgggaaatgaatcagtcacagtcgctgagcaaggaaagtgtcactttaagaagaaaatcttcttaaccttgaaggtttgatctatttgtagatttatgctctcaaaaaatattttatacagtacatcttgtttcaaaaatatctacaaatatcatctgtcacttttatgagaaacaaaaatattgatcacagttatcaagaacaaaatggataactcacaccattcaacatactgggtgttctcagctgtgctgctgatatattggagttcaaaatattatatttattcattaacattctgcaacatgtctcaaataatgaaagaaatggtgaatatgtataagaatacatttctatcagttggattaaagttttaaatcaaactcaaatcctatcgctaagggagataaaataagaaaaataaactgctggcaaaactcttattgtgagagagagaattgctc

SEQ ID NO: 49351 - DNA, 212 bp, Mus musculus
  source 1..212: mol_type = other DNA
ttaagtccaaaataagatttgatctttaaacttggccagtggttactcatggtcttgagtaatctctaagggatatagtttctagcaagattatgcgtagctgtctcttgggcctaggcggccagaaatgtaaatgagctaaatgggcatgtgttctactatgttcatagaaaccttgtttgtgataggttcatttacacaatggaatatca

SEQ ID NO: 49352 - DNA, 294 bp, Mus musculus
  source 1..294: mol_type = other DNA
tcccgctgggagaaagtactgaagctgcctcagctgctcattttgaaaacagccagtcaggcctgaaatgttatcataagctgtgtacattacaaagcgttgttcttctggcggaaggcactgcagtaccattcatcttcagaaatataatgctgacgaaagtcacggaaatatgaaaatttattaccagctaagaacacaagatttttgtttgggacaaaaagggtatttgtgcagccccaaaacaggccgacacgagctgcgctcgggagctgcagagacccagcctgggag

SEQ ID NO: 49353 - DNA, 452 bp, Mus musculus
  source 1..452: mol_type = other DNA
tcagcaccaattattattgtgtttgattctatatttacagccagtgaattaacctagtgtctgccaccttctactgtttttcaacacagatagctaacttaagaaagcaaatagaaaaatgatactaatagctaatattgattgctggcctgatttcaaatgcagcactctgactgctgcaccctgaaagagctcctgatacctgcagaggcttcctatggtagaatctggtattcattcttcctatgacttttgtcaaaatggatattttaaaatattatgatattttaaacaaagtgtattctatgtatataatgtgtttgattccattggatcgtagaaataccatatgaatgtaaactgcatttttagatcggtgttgtgacatgtaaacacgcatgtacactgtagcgtgctgaatcacttgactgatgcagtatagtccttcaaaa

SEQ ID NO: 49354 - DNA, 459 bp, Mus musculus
  source 1..459: mol_type = other DNA
atttcaagaattaagccccaaagtccttataattgacagtgttatatggaattccgtatgttaggaatgaatagtaatgcttaatactttcagaaaaaccaattgcctcttctatgtgtgacaagcatttttactgtcactgaatagtaacagagagaaagtttaaagaaatgcggctttactttaagctcactgatttgcattgctacatttattaaatatatatatatgtgtgtgtgtgtgtatgtgtgtgtgtatgtatgtatatatatatatatatatatacgttacaatttctgcttttattaatgataagcattccaatattacaatgtaggaaaaaacagaaaaactggtatgcagctaggggaggggaggaacaatcaactctcctcgttatgatatgattaatgagagctctcctgaatctcttctctttggaggctacattgaaaatag

SEQ ID NO: 49355 - DNA, 345 bp, Mus musculus
  source 1..345: mol_type = other DNA
cagtattgtctcctagcctaggctgcagatcaaaccaaacagcacctgtccggtgttctccctgattagagcctgcctaaatcccggtgtaagcgtgcagggagcatttctcagcaaaggctgctgcatctctcgctcagtttgtaaaagcagtatggacagtctgtcctgcgagccgatgatgtctcattgggaccaaaaatcatttttttcaagctagacaaggctaaatattcgttgatataaaagtcttaggatagattcttaggagctagtccaggcagtgattgtgatacatagctcagtctcagcatctgattcccactcagaggcccaaaggatctc

SEQ ID NO: 49356 - DNA, 260 bp, Mus musculus
  source 1..260: mol_type = other DNA
ctggctgcgcgcttctgctaagcgcccacccttccaacccagacctgagctctgggcggtggcgccttgcaaagctggagcctcctggtcgggccccgagggcgagcatatgccggaggcgtcctgcttgccttgggggacaccctaaaaccagcggatatctgtcttgatggtttcaagggaggcatcgcacagacagtcccgccgggggtgggggtggggggaccccctcctgggtggcggggcgcgaagcggatgca

SEQ ID NO: 49357 - DNA, 260 bp, Mus musculus
  source 1..260: mol_type = other DNA
tgtctcggtgagaatcaggactgactcctggtgaaccgagagcaaaaagaggttacagttacaagtgctataggacacgtcaaggaaaagcagctttcaaaagttcagattcctgttttccgggatcgcacgagatgagatccacgtggagcaggtgctctatggattcagagtggatctaggcggtagctgggactccgcgcacccgccgctctcaggcacagggcagggctccgaggggcggggccgcgcatccggtg

SEQ ID NO: 49358 - DNA, 416 bp, Mus musculus
  source 1..416: mol_type = other DNA
ctttaattattgagacttagaaccctaaaaccttatagtatcactgatggatccaagtgctaaatgtaggcacttggctcaaattgtgatgagtattttactcaagaaagcaggcagatttctgagttcgaggccagcctggtctacagcgtgagttccaggacagccagggctacacagagaaagaaagaaagaaatctttctgccccagaagcagaggcaggctgatctctgagtttgaggccagcctggtctacatggactatataactacatagagagagagaccctgttttaattttataagatcatcctgtgattttagggctttcctttggcccagagaatgtctacacaaaaggtctgtgaaaaaggcagttttaccttttgtggagattttggtaaaaggcaactat

SEQ ID NO: 49359 - DNA, 325 bp, Mus musculus
  source 1..325: mol_type = other DNA
cagaagcagaggcaggctgatctctgagtttgaggccagcctggtctacatggactatataactacatagagagagagaccctgttttaattttataagatcatcctgtgattttagggctttcctttggcccagagaatgtctacacaaaaggtctgtgaaaaaggcagttttaccttttgtggagattttggtaaaaggcaactatagctcagctcaagtaaagagcgttattctctatcacagctaaaatacttaagttttggttttggatctttaaatatataaaatctttggaaatttcgactcttaagaggctgggctt

SEQ ID NO: 49360 - DNA, 379 bp, Mus musculus
  source 1..379: mol_type = other DNA
atttccaaaagaaagcaaataattattttaaattatttgacttttcaatcctttctttcttttccttttttaaaaagatactgtataaaatatcacatgaaattaatgcaccaagtagagcatacatgcttttaaaagagaaaaaaatgatcaattcttaactagtagatcgctttgacacttcccttatattcttagaaaagaaaggaaggaaaagatgtgttcagattttaactcaaagcttttccccggccactccctggccacagtgaagcaatgggggtggacagagccacataggcgcatattcctgtgcgtagaaacctaggcgatccaaagcttttcttgcagagatcgatagctaggtttcaacctgtcg

SEQ ID NO: 49361 - DNA, 368 bp, Mus musculus
  source 1..368: mol_type = other DNA
aatgcaccaagtagagcatacatgcttttaaaagagaaaaaaatgatcaattcttaactagtagatcgctttgacacttcccttatattcttagaaaagaaaggaaggaaaagatgtgttcagattttaactcaaagcttttccccggccactccctggccacagtgaagcaatgggggtggacagagccacataggcgcatattcctgtgcgtagaaacctaggcgatccaaagcttttcttgcagagatcgatagctaggtttcaacctgtcggtgaagtcatccctggtgacaccttctcacaggacttcagggaaaatgctgggcgactgggcagcgctcctgcccagctgcctgtcacggtgc

SEQ ID NO: 49362 - DNA, 198 bp, Mus musculus
  source 1..198: mol_type = other DNA
ttaaagttttagatgctgaaagagtatttcgatcattaaaagcaacttcacatactggggcatataaagtttgcaagtccaatgggcctctggccagggccctgattggatttaaaaatctcacatgtggcccccttcgctgcaaagagctcctcaggaggcagcggcatcctccgtcggaagttccctcacttagaa

SEQ ID NO: 49363 - DNA, 309 bp, Mus musculus
  source 1..309: mol_type = other DNA
gttgtaaccacttttcctgggaaggacgcagcaatattatcgaaaatttttacaaatccaggatgtatatattcaaggcttctgcttgaagacttttgagatgcagagtcctctgaagaagacgcttggcccaccgcgcccccacccggcgggtttctcggaattcccccagatccacccagtcgcagtaccgcgcgcttctgcgaggggcaatccgccccggaaccgacgtgagcggcccggggcggggttagtggaagcggcccaggaatcccatccccacccccgcgcgcctggcacgggcagccg

SEQ ID NO: 49364 - DNA, 603 bp, Mus musculus
  source 1..603: mol_type = other DNA
cattgtaggaactcatctaaggagaatttacaagaagtcaaatcatctcataagaagccattgtttactaactcctgggtttctattcaagaattatgtatatataaagataaacatatcactaagctttaatttaatttacaacagttctgatcttcagtgagactttctaggcacttacatagaaatggagtaggacattaagattctctatcttttttttttccctatttaatggaaggaacaccaaagggggctttgcaaacgccacgttaagttactaagctttcaaaacttcagagccaggaaacctccttctcagggcggggaatgtctttgctctccagagacagaaatgtgccagaaccggacactggcatgtttctagtaaacgtcacaaatgggccattttttttgtagacgcgcagcacggtccttcacgccggagggttcgcgagtgggccagagccctggcggggaccaggagccggagcccggaaaaggcgtgctgcccctttaaaaggccgcgcatctccgggccggccttcctcccgggggctccaattgacgctgggcggcgagaggaggcgcctggcgctaagt

SEQ ID NO: 49365 - DNA, 509 bp, Mus musculus
  source 1..509: mol_type = other DNA
ttggtcaagcttttcagttttaggtaaaagtctcagctcagcaactgatttatcatgaaatcactggggacatattataacacagccgaatatttaccggtcgacttttaaataagtaaacggttgcagtagtccaggacggacagtcagtccctgccacccgcgcctcaaggccgcccggacgccgaggcctcggccttgccggacgctccggggacagcatggggctgtcggtgtcgggtcacccggagtccccgcccgctcgcccgccccgcctgactccccgctccgcgcgctcggctcaggcggcgccccggtcccccgcgggcgcggacggcagtggcctgtgcgagcgcagcgccccccgcggccgagccgtgcgcagcggagcggggaggcggcgccgggccggccccctcccgggtcgccagcggtgtcgcgcctccgcccgcccctgatttcctccgcgcggcgcggcggcggcggcggaggcgcctcgtgcgcgcggt

SEQ ID NO: 49366 - DNA, 244 bp, Mus musculus
  source 1..244: mol_type = other DNA
gcatggatacttggctctggactatgattcttggtgtcatgtgagaggatacatgaatcacctttctgttctgcataagaaagactctgcaaagcatctctgggctcagccttcagagccaaggcccttcagggtgaggtggcagcctgaggtcacttgaaatcagtactcaaggcacgtcaaataaaacaaggtgttctttgtgatctgggggctcagctgaggataagcccgccttgtcacc

SEQ ID NO: 49367 - DNA, 601 bp, Mus musculus
  source 1..601: mol_type = other DNA
gtcaagcttttcagttttaggtaaaagtctcagctcagcaactgatttatcatgaaatcactggggacatattataacacagccgaatatttaccggtcgacttttaaataagtaaacggttgcagtagtccaggacggacagtcagtccctgccacccgcgcctcaaggccgcccggacgccgaggcctcggccttgccggacgctccggggacagcatggggctgtcggtgtcgggtcacccggagtccccgcccgctcgcccgccccgcctgactccccgctccgcgcgctcggctcaggcggcgccccggtcccccgcgggcgcggacggcagtggcctgtgcgagcgcagcgccccccgcggccgagccgtgcgcagcggagcggggaggcggcgccgggccggccccctcccgggtcgccagcggtgtcgcgcctccgcccgcccctgatttcctccgcgcggcgcggcggcggcggcggaggcgcctcgtgcgcgcggtccgggcccagagcgctttaatggagccgctgtcagcagaagcctctgctgccgccgccgccgccgccgccgctgccgccgctgccgtccctgttt

SEQ ID NO: 49368 - DNA, 326 bp, Mus musculus
  source 1..326: mol_type = other DNA
ttaatcacccaatcagccttggggatgtttaacacaggtcctatgctttaatatttaactgcaggcaaaaatgatctttcataaatggccttgaagctcaagcttatcaatctaaacttggctttttaaacctagggttctgcctcaaggctggagccatgcccgatcacatgaagcaatctaattcaagatggcacaatgttgtgcaaggccacgtgggctccagaggccgcgctggcactgaggccggacatgcgcagtgggcacacggcgcgggccgctccaggctccgcggctcaaatcccacgcccccttgctgcaggtca

SEQ ID NO: 49369 - DNA, 380 bp, Mus musculus
  source 1..380: mol_type = other DNA
cctctcttgtcttcttctggaaaaaaggaggggaatcaggagcaaaaaaaatcttgtatccttttcttgttttttgtattgttttttaacaattaagaaattactttatggaaccacttgaacaagccccgggtggcagacatagcaggtttgtcccgtggtgatgagctggtgaggggcattcggtccctcggcccattggctctggtgcagagctcccgagaggactctacagggtgagcgtggaggtgcagccctaggggcagagccgcggcctccgcagcgctcccatcgctgagcttccgccgcgcccttcacgcctacctcgcgcggaggctccgccctagactccgcccccgggcgtcagtctgcgttcaggg

SEQ ID NO: 49370 - DNA, 463 bp, Mus musculus
  source 1..463: mol_type = other DNA
cctgatatcaaggtagttgaatagcaggggactcctcaatttcctgatgatctttgaataatccgaaaaggatttatttactagattttattttacgttatagagtttctctatggaactcacagatatcggcctagaaggtgagcaaggatccaatgaccttaaagaggtctctccccatccgtcggtgcgaatgcaatgctttgcttgacaccatttgccatttgcatatgaaataggctgcttgttctaatggctcctttgggtcacaattagcctatcttagtcacaattagtcttaattgtgcacacaaagttgtttagacaaagtaagactgaatttcctaactcgagtaatatatccagagctgtgtcttattgttcagagaaataatttaagctcctagaacttgtggttgcaaccaagcagttaaattgctttctcttgttgctaaacatgatt

SEQ ID NO: 49371 - DNA, 405 bp, Mus musculus
  source 1..405: mol_type = other DNA
agctgtagatctttacacacacctattgcaaggtgaacacaaataagcagaatttgatattccacacatctgatttaacgtacattttctttaaaacatctgggtagcctgaggacccagcacacttgggagatggggattccccgcaagcaccccctctctcgcgcctgctttttacatacaaggagacggtagactagagcagataatcgctgtgacgctccagcgctaggaccgcttgcagtgcaggcgcgagagtcctggcagggggcgcagtgcccgtcctggaaggccagtgtggctccctgctcctcccaggtttggagcagccctggaggaggagacctggcccgctccacgtttccgggctcccaggcgcggctccgcccctccaggacccggctc

SEQ ID NO: 49372 - DNA, 491 bp, Mus musculus
  source 1..491: mol_type = other DNA
cctgcatgtgactgacagccacacagggacatagatgaaggtcctgagggcctgctgcctctgtgttgcctaatgactgactaactgagagacattcggaaatctcattcacagactccaccgcggtcagtggaggaggactctagatccagcaagggtcttccttgtaggaagtttactcatattccagattttaaaaccagactgagtttgcataaagcaggccccaacactacgaaagaacctttcacagacgtcatgcgttctgccccgcagaatcaactctccgcgtaggctctatctcgggtgccggggatgcgcatctctgctgctgttgctgccgccgcgaaaaccagaagtggaattcgcgtggcgaggcgccgcgctctctcggcggcactgggcatgctccgcacccggggcaggtttcggtggtggggcggacgctcgctcgctcactagccaagcgccggagccggccgccgcggctg

SEQ ID NO: 49373 - DNA, 644 bp, Mus musculus
  source 1..644: mol_type = other DNA
ctctagatccagcaagggtcttccttgtaggaagtttactcatattccagattttaaaaccagactgagtttgcataaagcaggccccaacactacgaaagaacctttcacagacgtcatgcgttctgccccgcagaatcaactctccgcgtaggctctatctcgggtgccggggatgcgcatctctgctgctgttgctgccgccgcgaaaaccagaagtggaattcgcgtggcgaggcgccgcgctctctcggcggcactgggcatgctccgcacccggggcaggtttcggtggtggggcggacgctcgctcgctcactagccaagcgccggagccggccgccgcggctgagccggaggctgagctgcggcgcgcggcgggaggagcctcgctctcggcggcggcggcggcggcggcgacacaggtggcgcgggcggcgcgcagggcgcagctcgagagcgctcggcgccgggcgccagggcggcccaggctcgcgcccgcggcggcaaccggccgagcggagcggcgggcgcggcggctcggtagcccggcccgagcccggggagccccgcggaaccctgagcatcccgcggcgcccgccgagtcgggcagggggcgctacgctcgccgcgctcggaggggc

SEQ ID NO: 49374 - DNA, 339 bp, Mus musculus
  source 1..339: mol_type = other DNA
aggccctgtcacgaaaaaagccttgtgggttgtatgtgtagaaattgtttctatgcaagcctgcaaaccataaataattctgagtaatttatgaattacttgccaagccgaatggcagctggcaccctgcctcttttctaaagatagaagactgctgatcttgcagagcgaaaccccgcgctggggtctcgaggtccagcccctcgctggtcgcagggccgccccgcccttacgtggcgctggccgctgcgcatgctccacaaggacgggcggggcgaggcgaggcggctcacagagttcgggtgggcgggaccgtgccacgcagccgtttggagccac

SEQ ID NO: 49375 - DNA, 508 bp, Mus musculus
  source 1..508: mol_type = other DNA
gccagtaatctcgatttccgaaatgtttctcccctctgccaagtgacaatagtcaggagttggggagagtagagccctctcacggctctgaccagctgccagtcacagccggcttgggtgacttggagactctgcagaccctgggtccttatttggatcaggctccccaagatggaatttcctcctaagtggacagcgagcggacgcttttccactctccaagagagttttcagggagtcccaggactgcaactggtcagaactaggactgcccgagaggtgacggtcttgcggctgcccctctccttcggccctggggcggattacggtccttccgacgctggaaatccggactccatctccgcccgggcccccagggagcagcccttggcggggcggggcgcctgctgtctcccggctcccgggactctaaccgggaaggcgccccgcccgctgcctcgctttcaccccgcccggcggggcagggaaagcccccggcggctcctcc

SEQ ID NO: 49376 - DNA, 307 bp, Mus musculus
  source 1..307: mol_type = other DNA
tcacaactgtctacactcacgtgaacacgcatgttatacataaaaatacaaataaatacattttaaaagttaaaaaataactccatcttagagaaaatgttttgcttttgtgacagtttcagaaacagggagatgccctgaggacaagcgctgcccagagctaggccttgtggggtaatacacaaatgtacaggcccagggcagagtgccaggctcattccctggcttccatccgggagccaggatccagcttttcccgggaatgcaggacactgccacagcagtgtccacttcccgtgcagactga

SEQ ID NO: 49377 - DNA, 348 bp, Mus musculus
  source 1..348: mol_type = other DNA
gaaaaaaaaggtcaatgtaggctaggctcactttttttttttttttttttttagatacaacagcaaaatataattcacttaagaaaacaaaagctgaattgtcacaatttatacctgagacttttaagaataaaaggaagcgctaaaaataataggcattattatttactcctgtgtggacacacgccaagccgagaccctggtcgagacctcttggggttcggatcacagaggccagccggacgtccgccccttgtttgctgaggctgtgcgcatgcgcagctcgggttgcctggagaccgcacgccacaatcgcgtgctctatccgctctgggcggttgggcctca

SEQ ID NO: 49378 - DNA, 453 bp, Mus musculus
  source 1..453: mol_type = other DNA
cccggaaaactttcttctaatctgtactatcttatttagagaaagctctaaggaagctgcttctgtaattctttcagacgtgcctcagaaccactcaagagcggaacaaaatgctcgttccggggccgactctgaacgccccgggagtggcggtcgggtaccccaaggggaccctttgtcccccacacccgctccggcgggcgggcgggcgtgcgcgccgggctcgctcccgccgctccgcgttcctgtcccggaacgcgcccgcgccgccgccgccgcagccgcccctccgcgaggtgcctgccgcctgtttcgcaccccgcccccgcctccgcgagcccggcgcgagcgcgagcgaaggcgcgcgccggatgtgacgcgcagcgctccggcgccccgccttttccgccgcgcgccccgcccaggcccgtcgctcggccgcgcgcccctccc

SEQ ID NO: 49379 - DNA, 260 bp, Mus musculus
  source 1..260: mol_type = other DNA
ctcgaaccatatattttatatttttcttcataagacttaaccagaaaacaaaatctctgctgagcttttttgaaaacaaaaacagtctttatgccacataggaagcatggtcaggcctatcaaagcaataccccggtccctggtactagttttctacatctctgctgaacaccatacctagtttatgaagtcctaggaatctaattcctgagtttatttatagtttatttagcatagattaaccttagatatgaatcact

SEQ ID NO: 49380 - DNA, 379 bp, Mus musculus
  source 1..379: mol_type = other DNA
ggggtatcttctctaagtaggcattatcattattattattattattgtttttgttgcttattgctgttattattgttattattattattattattattatctttgcagacaagaaaacaaagcccgcagggtggattccagccgacccacggaggtgcggacagcagcccccagcaagcactgtggtagccacgaccggcgcgggacggagagcaccgcagccacgcgcgcccgtactcgctccatcgcgcgttccggggagaccggaagttcaaaaactttgaaaacttaaatccttgaatcagtgactacattatgtctagtattagcatttgtgtgctagacgtcgccttctaagtttcgaagccctctcgcgaga

SEQ ID NO: 49381 - DNA, 472 bp, Mus musculus
  source 1..472: mol_type = other DNA
agggacccggcgcaggcctgctcgcccgcccggtgagctggggatgcgaccccacccagctctgaagcggcggatcgcaccgtgggacgaaggcctctacgccctctcccgcagccagagcggggatgtgaccctagagcccaaaggggctccccggcaccggagattctcgagctttcgggccagcacatggccgagctgctctctcgccagcgcaggcgcacaagcgctccggcgttccgggccgttaccttgagggcctcaagccccatgagaccttgatgagaaaggggcgcccatactcatcgaaggcgagggtccccacggacgccatggtggctcctccagtaaccagcggggccctctcgcgagagggcttcgaaacttagaaggcgacgtctagcacacaaatgctaatactagacataatgtagtcactgattcaaggatttaagttttcaaagtttttgaa

SEQ ID NO: 49382 - DNA, 435 bp, Mus musculus
  source 1..435: mol_type = other DNA
catgcagggtctcagctatgacactcagggactctgcggggagagagctcaccagatgccgggcgcgttcctcctgctagtcatccagcgccccggggcccggagctgctccaaggggaagtcgaggcagccgccaccactgcatcgcagcgcgccaggctggggaccagctagtctgccggagtctcagctgcgcgtccccgtcgccacaaggctggggccaccgtcagccaagggctgaggagcccacccgcggcgggagcgcagcgcgcgcgggagtgggcacagcgtgagcagccgctgctgacgccgccttcctagcgagtagaccagcgctgggtgagcgggcccagagctcggggcggggagcacaggaccgcctcgcctcgccccgcccccgccctccccagggggctctctacacaccccaggagt

SEQ ID NO: 49383 - DNA, 461 bp, Mus musculus
  source 1..461: mol_type = other DNA
cgggtacctgaaaggtgctggccgaggtgcaggcttgcccactgaccggtcgcacacccatgcagggtctcagctatgacactcagggactctgcggggagagagctcaccagatgccgggcgcgttcctcctgctagtcatccagcgccccggggcccggagctgctccaaggggaagtcgaggcagccgccaccactgcatcgcagcgcgccaggctggggaccagctagtctgccggagtctcagctgcgcgtccccgtcgccacaaggctggggccaccgtcagccaagggctgaggagcccacccgcggcgggagcgcagcgcgcgcgggagtgggcacagcgtgagcagccgctgctgacgccgccttcctagcgagtagaccagcgctgggtgagcgggcccagagctcggggcggggagcacaggaccgcctcgcctcgccccgcccccgccc

SEQ ID NO: 49384 - DNA, 327 bp, Mus musculus
  source 1..327: mol_type = other DNA
accctatcctgagggaaaaggatacaaccttgtatgttgtttagaacttggtgagttgatcacttccttagaaggagaactgaacaacgcgtcaataaagctgccttcccaaggcatttactttgcgttccaagataaagatacttgcggagtactcctaattcccattagggctacttggctgggcccagctcgtgatgacacagaagaactgaacactttctgcgatccgccggggactcctggggtgtgtagagagccccctggggagggcgggggcggggcgaggcgaggcggtcctgtgctccccgccccgagctctgggcc

SEQ ID NO: 49385 - DNA, 441 bp, Mus musculus
  source 1..441: mol_type = other DNA
ttctctatttacatatctatgtacatacatatatttctgcatgtgtaggcatgtctccatacatttctatgtacatacatgtctgtgtgtatatgtatttgttttgtgcacaccaatacatgtgtatgtctgtggaggtcagaaatcaaactcaatcacatattggctggcattacaatgtcaaaccacaagccagtacatgcagcttttttttttttttgtatgaactctgggcattgagctcagatttttgaagcatcagctgactgagcatctgacccatgtttgtcagagtcagtggatctgggagctgctacagctgatgtgacaacgcatctagagtccattactggcacgacaggaacgcagtggctgttgagccccatttgtgtcccacatgctgtgctgcctagctggatgtggctgggctgtgtgcacccc

SEQ ID NO: 49386 - DNA, 303 bp, Mus musculus
  source 1..303: mol_type = other DNA
atttttcatccttatctgttgcaattttacattttccaaaagtaaaaatatggaaatcggaatcttaacactaacttgttacaattatttttgtcgttgacccaattttcacaagtaagaaaaggctcaatatgcccattaaaccttcatcgaattttctttagaaaattacagcgaagacagccacagagtggagctgctggctcccactggctctgggagctgccaatcccagtgtaatcccgtaagaatttctccctggttttctcctttcccccagtagctgggaggaacaccagtcta

SEQ ID NO: 49387 - DNA, 344 bp, Mus musculus
  source 1..344: mol_type = other DNA
gaatcttaacactaacttgttacaattatttttgtcgttgacccaattttcacaagtaagaaaaggctcaatatgcccattaaaccttcatcgaattttctttagaaaattacagcgaagacagccacagagtggagctgctggctcccactggctctgggagctgccaatcccagtgtaatcccgtaagaatttctccctggttttctcctttcccccagtagctgggaggaacaccagtctagctgtagagtgctgtactccagatactcctggagctaaacttgagcggcagctcggtttcaacccatcgactgcttgcttcaaagcctcgcgaagcagca

SEQ ID NO: 49388 - DNA, 519 bp, Mus musculus
  source 1..519: mol_type = other DNA
tttctgtgttttgagataacacatacatggatcagaagtattttacaaagataactttgataagagtctggctaagtaaagaaatttaaacataaaacattaaaaacatgtgcacatgttgcagtttggactttatgcaggtccccaaactactgaagtcatgcagtgacttgatgtgccttccttttctcagaggagaagtgaatgaatagatagatagatagatagatagatagacagatatgcgcacatgtactacaagagtagtatagcattgctcttctcctttcttacagtctttcaactattaaggaagggagaaaataacggattgataacatgaacaaaataactgttgagttgcttttgttgggaatttgacggttccaacaaagtctcttgaagccaggccttggggaccctacttgccttaagtcaggctcaaggagaccttgttaaagcccaggcctcgggcctggctgacggttgcacctttgtctccgcccaccggccagggag

SEQ ID NO: 49389 - DNA, 593 bp, Mus musculus
  source 1..593: mol_type = other DNA
gtattttacaaagataactttgataagagtctggctaagtaaagaaatttaaacataaaacattaaaaacatgtgcacatgttgcagtttggactttatgcaggtccccaaactactgaagtcatgcagtgacttgatgtgccttccttttctcagaggagaagtgaatgaatagatagatagatagatagatagatagacagatatgcgcacatgtactacaagagtagtatagcattgctcttctcctttcttacagtctttcaactattaaggaagggagaaaataacggattgataacatgaacaaaataactgttgagttgcttttgttgggaatttgacggttccaacaaagtctcttgaagccaggccttggggaccctacttgccttaagtcaggctcaaggagaccttgttaaagcccaggcctcgggcctggctgacggttgcacctttgtctccgcccaccggccagggagggctccacagctgtcctggcaagaagccaggcctgcagactactggggctccgggctgttcctgaggcctctggaggcccgccctgtggctccagtgcgctctgaggacct

SEQ ID NO: 49390 - DNA, 274 bp, Mus musculus
  source 1..274: mol_type = other DNA
taggtcttacacacttttagttaataatatcacagtcatttgtctgagtaacctttgtaacttttctgagaatctcaaacctatctaaaaattaatttaaaaatttaatggaaaggttaaataagattctatcatttgtgtgtgttagacctgattacacagcattaaaataattcttattagcaacaatctttcaaaggaatctcaggctgcctgagtcctccagtatgatcaaagagacatagaggcgggcctctctacccctcctggtgag

SEQ ID NO: 49391 - DNA, 318 bp, Mus musculus
  source 1..318: mol_type = other DNA
ctgggattcacagcgttactctgtgtagacctgttaacatgctgaacagcttagccatagccatttgcaaaggtatggtagcatggtaacataattaggccaagcaggactgaatccatatcactgagatgtaactttgccattttatcaggaaactggaaattagtattcagtaaaatgccttgtatgttacttttttattctttctaagtcattttacataaatattatagaataattatgtaatgagaaattaattatgcgcagccgctgagcggagccaatcactgggtgcagtggcctgccgtggtgacgtca

SEQ ID NO: 49392 - DNA, 348 bp, Mus musculus
  source 1..348: mol_type = other DNA
aaatacataggtttttagtttgtatttacttcagctgcttacatgctaattaacatttaattatagacactgtttccttagtcctcaagcatttttaaaattaagaagggaagaagcgcctcagctctttataatgctacatttgactgttggacaacacaagcattcaaaaattgcaattcttttggggttgtataaaagcttaaaataatatgcttctcttgcatataaatatttttcggatgtgaattctcagagtccaccgagctccctctggaagcatccgggtttggccgccttgctcgtgcgcaggcctcacacctgaagggtgacccgaccggcctccgc

SEQ ID NO: 49393 - DNA, 430 bp, Mus musculus
  source 1..430: mol_type = other DNA
agactaggatggctgtcctggaacttgctctatagactaggatggctgtcctggaacttgctctatagactagactggctgtcctggaacttgctctatagacgctggccttttaatttaagttatcagagcttcttagctagctttgttttactagaacttcagtcattattaaaaatcacattctattttctgggaaaagattgctactaaagtaattgagctgggaagctgagataaattgctctcagttgactggaataatcattctaagcagttttccttccttgcaagctagatgtgaggcaacacagctggatccggaggaaaattctggagactccctcagggtcagcgctcccagcgcccgcagctggctggagccggtggtgacatcacgagcccgggcaggccacgtgacccacggctt

SEQ ID NO: 49394 - DNA, 353 bp, Mus musculus
  source 1..353: mol_type = other DNA
aacaaatggagtactactcagaaacaatgaattcatgaaattcctgatgaggcagtgtggatactttgttccttcatagaaaaagatttaagttttctgaatagcatcttaatggcctttcccatcccagtggctggtccagggccagtggatactagtaatatgaattggcgctggtggggctgtcctagactgccaagacaacttctggctgtgtcatccatggatgcctcccgaagaaaatgattctcaattcatgttatatgactccagctgtgtcaacctctggagatcgagctgggggctgcctgtagcgtggggcagctctgactgctgcgcgccgccctttcagg

SEQ ID NO: 49395 - DNA, 345 bp, Mus musculus
  source 1..345: mol_type = other DNA
ggttggctggctagccagccttggggaatctgttccacaaatggagttacaagtgtgcacaacttgtagcaaaatgattttttaaattattcgtattgcgactatttctttacttctgtatacgtactcccctcccaccacgtgggttagagatgcctccgctcctggtgagcagtcacggggtaaaccggcggcccggggtccttccggagcacgaggagaggccaggtcgctgccgcctcgccacggagccctgggcctcgtcgtcagctcccatcgagctccggctctccgcggtgtcagcccgctgcccagacgccgcagcagcccagcctgcgttgtaac

SEQ ID NO: 49396 - DNA, 171 bp, Mus musculus
  source 1..171: mol_type = other DNA
atgattccttagcaatgagtacctctagttccagagacttgtgacaagatttaatggcctggcatgatagtgctcacctttaatcccagcacctgttcggccctacataatgaattttcaaataaaaatagtaatttaaaaaattaattaaaaagacggctgcagccgccg

SEQ ID NO: 49397 - DNA, 539 bp, Mus musculus
  source 1..539: mol_type = other DNA
aggccagcctggtctacaaagtgatttccaggacagccagggctcaaacaaacaaaaccactttagatgctttatgtcttgcagtatcaaatactctaccaaaactcgtatttatgaaaaaataaacatacacacatctatttagagagtaaaaattagtttttatctttctcaaaaggcaaaattataccagctacactaaagaattgttttaaatatacttccttatgatatattatcagttactaattagtacatcttcttatctacccaggttcgttagtgagaaagtccggaaagcagaccccggtctgctcaaatctctgtcctttacggtacccagaattcccagaggggattccgccgaggctctggactgcaagagggcccgcccgggcagcatggacctccccactgtgggcaagcccccacgcgaggcccccgcgagctggcggccccggctacggagcgagcgggctgagggcgcgtgcgcagcacggcttcttcgggccgtgcgaattcgccctgataaaactctt

SEQ ID NO: 49398 - DNA, 358 bp, Mus musculus
  source 1..358: mol_type = other DNA
acaggtatttgctgagtactgtccaaatgagacaagcatatcttgtaaattaagaaagggttacaaacagtgtattatactttttatagcaaacgtctttaacagataaaccctatggaataaatgctaatggtataaaccttattagaatgagaattctatgggttgtttattctatcttaataaaattgttacaaaaaccaaaaccttcggggccccggcagctccagagcaccagggctcccccattctctgaggctcttgcaacactgctcttgaagacagaagaatgtccactgaccagacagccctaggcaaaagagttttatcagggcgaattcgcacggcccgaagaagc

SEQ ID NO: 49399 - DNA, 328 bp, Mus musculus
  source 1..328: mol_type = other DNA
tgcatagcttaaagagtctcagtgtcttgaaaacaatgttaaccgagtttaaaaccggtcagactagaatatccagtatgcgtacttaaggatcaggattcattcacaatgtgcccaatattggggacttttttccatatgtggaacattttaaaccttttacacgaacatttgctttgtgcacagggcaccggggcccagaagggagcggcggcaactgggccgagcccggacctcacctgcgtgccgcaggagccaggtgccggcgccgggtcgccgggcaggaagtggctgcggctgcgggaggacggacgggagggccgcgccc

SEQ ID NO: 49400 - DNA, 348 bp, Mus musculus
  source 1..348: mol_type = other DNA
gtggcacccttagagccacatatgaagaatggagccaccttataagaactgtccaataagggtctatttcttggcttggccaatatgagggctgaagtcagtgtttatacagcacacagtttctcacactgtatgatcctcatacatggcacactgtatgcatcttcgacatatttgtcaaactttacacagattttgggtagtatcatgcagagtggtataggaaacttttcttcaggtttctaaaagaggactgtttcctacagacccggcgagggaggaaactctgtctgagccctgggggtgctgacaataacagctgtgacagaatgatgctccggaacgtct

SEQ ID NO: 49401 - DNA, 513 bp, Mus musculus
  source 1..513: mol_type = other DNA
ttgcccaattcgttttaaagaatattctagaaaaaaaaataagcaaactcatttgtatagttgttgtgtgtattttatggttaaatagtagacaaccaagaaaaaaagaaagatattcctttagtatctttttccaagtgggctttccatggactctggtgttctaaatttgtgcaccaagagatcactgcagtaaatattttctgtcattggactgtaattattatgcttgtatacaatcaaaatcaaccagaatatagttacaaatgccaattgagctaataataactaataattataaattggcatgtatttgaatcctgagaaatgagtcaaatctctaaccagcacagtagcttttgggttgccaaagtctcactctggtagcaagctaagtggctgagctagggcccgcccactcttctggaccgcgctaggctgcgccggcctcttcccaccagctcggagctgcaggccacggccgaggggcggggcggggcggccgggaggaac

SEQ ID NO: 49402 - DNA, 381 bp, Mus musculus
  source 1..381: mol_type = other DNA
ttttccagagggactgtaataccctatcaattttccaacaatgaactcaatttttgctgagaatgaagataatgcactggaatagttttttcctaaaatttaaaaaagattgttcttcaatggctaagttggttaactgcttatgaaatgtacattagctgattaaaagaaatttctcccggaacaactaattatgaaattagtcaattgtcaccttcataaacaaacttcgttttgaaaattgaccaaaagtatgggcagatgatcatattaaaagtgttaagatgtgtaaaccgggcttggaggcggagcctgggcgctgcagccttgctcctctgcaggacgcccgccgcgaggggaggcggggccgctactaaagcc

SEQ ID NO: 49403 - DNA, 400 bp, Mus musculus
  source 1..400: mol_type = other DNA
ggaaaatccttattacctacggagacggaaataaagatgaaatttattgtttttaattgaagagtaaacagtgatgttagtagaatcttccagtgtgctctgactgagaccctccgactgttaatctcttgtctccaaactgttccaaacagcttgcgagagcgctgtgtcatagcgcagccctctaagcctgctggcagataggcagggagagtagggcaggccctagcgcccccctgcctactccagcgaagttctcagctctaaaccctgcacctgggaggccaccctaggcggtgctgccaggctcactgtgaacgcagtcagggttgcccctgtggggggtgccagatcaggaagcagcccccttttttctgagatcctagcgctcggtttggga

SEQ ID NO: 49404 - DNA, 347 bp, Mus musculus
  source 1..347: mol_type = other DNA
tgaataacctataaaggaaaactattttcaagacactatgttttcttcaaaagttacctaaaattaagagaggctggtttaaaaaaaaaaaaaaggcagcatatcccatgctatttctatctatcttctaaggtagatgtttgagttattgctcccacaagttaccactactaacatctaaaaaacttcagcagtaaatttaaatcttccgtcacgtcccggccatcgccgtgtccctgcagcgccacttccggatcgccgggggatcccggcctagccaagccggagtcgtcccaggcaggcagacgcgcggggtccttgtccccacgtggcgcggaacgcgtgag

SEQ ID NO: 49405 - DNA, 235 bp, Mus musculus
  source 1..235: mol_type = other DNA
attgttaatagtttaacagagtgtattaatttacagtcttacttatggttttaaatagaatgtgaatgaacccagaagctcacaggcaattatttctttatttttactttaaaaaatttatttaaggtgtatgaatgtgtccttggaagtcaaagacctggccaggttcattaatctttttaatcactattacgtatctgtttagacagaatctctacagaacctggagctagac

SEQ ID NO: 49406 - DNA, 424 bp, Mus musculus
  source 1..424: mol_type = other DNA
ccaatgcttaataaagcttgttttaaatttggttcaaaacttacagtagattttgtaaccatgggttcaactgctcaagcagggttcctaagccctctcaaaccctgcatatatataaagtaggcttactcagctgacttaagtaacacctgtgaatctagttgatgtcactgaagtaagatattattacgatttgttaaaaattacatgttaaactctgaaattgctctttgccaaaaaccaatttgacacaaatgtcatgtcccccaagatatgccttttctcaaggtattaaaaaaaaagctctcagatgatgtagtgcctttatagagtatattattttttccccacatgtgaaatatatacgaattccttaataagtaagattaatatttgtaatttactgatttgttcgttcgactct

SEQ ID NO: 49407 - DNA, 404 bp, Mus musculus
  source 1..404: mol_type = other DNA
atgtagacatggctggtctctatggagatcctctgcctcctgactgcagagactatagaggtgtgactcacaacttttttcttttttgtctattcacaaaatttatatatttgttcactgtagaaacgagggcaaaatcataaactatttttaaaaaaaatcattaaccagagttcaagtccagcctggacttcatgtgaaaaccaaaaccaaagttggggggtgttgctgggttccaggacagtcttggtccctccagtctggtcgcagtggcaggggcgggctcggccgaggctcccggctcaggtgggcggcgcggcccaggtgcgccggcccgcagccgctccgccctcctcccaggggcgtctcccgcccgcacgcccgcccgcacgtccgggtgacga

SEQ ID NO: 49408 - DNA, 353 bp, Mus musculus
  source 1..353: mol_type = other DNA
cactgaggaaattcagaactacagaatgggataagttttataaaacaattaggacccagacagggacttctggccaggacataaattatttttgggacataaatatttttagtatttagaataattgtgtttaaatttttatcttttctatttaaataaattcttcacacattttagggtaactgtaatctgtagcgtttatgaaaaaccttttgctacaggcgtctgacctaaggaaacggcctggccttcgctgtgggaggatctgctccccccgcccccgcacggccgctccccagccgccacccctggcccaggcgcctctgctttgtcccaacagcgggcagccccag

SEQ ID NO: 49409 - DNA, 364 bp, Mus musculus
  source 1..364: mol_type = other DNA
tcaaaggtttgaactagaaatgaaagacaaagctcaaagttcttctttactaagttaccagagtgcccactgggagagaagccatctctttaatagttaacaactgtttttacttcaggttatccatcctattattaaaataaacgactggtgtgaaataatcagatgtgttttactgagttccaattttgatgtgtgagaacacacacctgtactctactgaataagagcagtctcagcctgggcttttttccactccccaacataaaaaagaacaatttgaaaaccgccatgtgcgagcgccagtccccccgcactgcgagggagagggggcggggcttcgtttcgtcataaatcggcgccg

SEQ ID NO: 49410 - DNA, 476 bp, Mus musculus
  source 1..476: mol_type = other DNA
agcgtgcaaccctggctgcctccccttttaaaaaagcattgctttctctgagttcaaggccagcctggtctacagagtgggctacacagagaaaccctggaaacttgcagttgaattaaaaaatcttcagtttgaataaggcatctaaggagaaaattcaaagttttgtttttatattttggcaggcctgcaagagctatgattatagacatgtgtcatacagttatgaatgaaaagttttactatttttaaggcctcattaagcttgtgaattcactttgaaatgaattgaaaatactttatctttcaaatgacctctagtgacttcactcattcctgtattgggaataaatgcaagctggaccgggtccttggagatcctgggacaggccaagcaggacgcccactcggggtggcggggagctgggactccgcccgcagggtggcgccgcccgcactggccaggctggatcgcg

SEQ ID NO: 49411 - DNA, 411 bp, Mus musculus
  source 1..411: mol_type = other DNA
cactgcttgatgcacatacctgtgtatttagatagaaatttgacttaatttataaccgtatgatactaacactgttctactgagctgaaatttcatttcttcatatgcaatgtggatatcaagcttaatgcagcccattggtaaccatttggatacttagatgcacaactctgaagtagaaatacttggtactgttacatatctcccatattacagtcacctgtcactaaggcaagttagtgctcaccttggattatatagaaaagaatgtgattattaactacactcactcaggctttagtaaatttaacgttacataacctcaatttttaacatgtatatctttttgaaccatgacacgagcagaagttggccaaaatacttgttaccattatgtgctactgagcattt

SEQ ID NO: 49412 - DNA, 447 bp, Mus musculus
  source 1..447: mol_type = other DNA
aagttgaagaaataaaatgaaactaatttttgtaataaattttatttagcccagtacacccaaatgtcattccagtgtgattaacagatattctttgaccttcacagtgggggtaagagcactgattgctctcctgaaggtcctgacatgatggctcaaaccaccataatggatacagtgtacttatgtataataataaataaatctttgggctacagtgtactcatatacataaaataaataaagcttttaaaaaagatttttatatatgagtacaattatagttgtcttcagacaccaaatagttgtgagccaccaagaagagcagtcagtgctcttaatctatatataaccctggctgtccacctggtaggccaggctggcctcgagggattaaaggcgtgcgccgccgccccccttcttaatgttttgaagccatatacagaa

SEQ ID NO: 49413 - DNA, 508 bp, Mus musculus
  source 1..508: mol_type = other DNA
tttgatagcattttaaggtatacacataatggctctcaacttccaataaatggaaatcatatccatacttactccctttaagatgtatggtcaaagacatttagctctgtttctaactgggaaaaatttactgtgttaccaaagaggttctagtttagacgtggatggacattttggcatccatcacatccatttctcaggattctaaggaaatgatgaaagggatctgtttatttaactaactctataccaagtcttagtaactcctactgtatcagacattgataagacctgagatatttccaggaagcgctccacttggaacgcggctcacggagacggggtcggggttacaagaagggcgtctcccgccccactgcccggcgcgttccgagtaagtcgccgcccgcgggagggccggcggcgagagcgcgcagtgcgaggcgcgtccgcggctggtcgacgtggggcggggcggggcttgacgccaagacgcaaggcgcgctgg

SEQ ID NO: 49414 - DNA, 244 bp, Mus musculus
  source 1..244: mol_type = other DNA
ttttaaatttcctataatgagagaaagaagagccagcgctggggtgatgcggtatgaggcggatctgaatgccatctcatccccctcttggagacaggagacctggcaggcatgtggctagagcctctggcctccagggtgaccctggcctgagatctggcatccctgaggtccctctggagcggggcggggtggggcggagccaggcgcagaccccgcccacccgcagacccaaggcaggagt

SEQ ID NO: 49415 - DNA, 476 bp, Mus musculus
  source 1..476: mol_type = other DNA
aggtcagcctcaggaagatcatcttgatttttttttgagaggactctcattaaagccctggcagactggtcagggggaccactgagccttcttataatccttaaatgaaaggaatatgaggtttccttaagccaggcaatactccacaacaccctacagggtcatctggtgggtttttaattccatatatgggtgtatcatcattttcacatgtcatgataagtcaaggaacccttataagtgggtgtaagcattcactctgaataataactcggcaggattatagcttagagtagacttgtcagccattatttgctaacttgtaaactaataaattaatgcgcgtggcacttaatatatttggccgaaccgccatgagagcctcccgcctgcagggggcgcgccgccgcggggtgcgaggccgctctgccctcgcgagctccacctctgtggtcgtccgcgccccgcctgtcgcc

SEQ ID NO: 49416 - DNA, 783 bp, Mus musculus
  source 1..783: mol_type = other DNA
caccacgcctggtggtggccaaccacgcctagttaagcaggctatccaggtttgtttgggtaagaagaaacgcatactttaaaggaaaaaaaatttttttttcgagtcctttttaccactgtaaaaaatgtaggaagttcccctccccctcgtcggggccgcggacccgtgctgggtcacgcccgggacggttggggtccggttgaggtcagccagcccgcggccgttgagaactccagctcccggcaggcaccgcttccgcggcccacgcgcgtggcggcgctgcccgctgggactcgtagtgcggtccgggtaggagaacgaggcagttaccctgcctccttccgcccggccggcaaggctcacgcccgcccacccgtttccagcgccgctcgggggtggggggctagcgggaagaggccgccactagacgcgcacgtggggggcggttggcgcccagaaacccggaagccccgcgcgctgcccacccgctgcgctgacgggttaacgctctttcgggcgggggcggggcgtgtgcgcaaggggcgtgaccagcggccgcgccgaggccgcccactggccgtcccgccctttcctggctttgcgcagcgggaagtcggcccctggctgtggcgcctgcgcagaagccccgccccgcctcgggcccaacccccacgcccgcagcagcggcagccgccgccacctctccctccgcctcctccggcgccgtcgctcgcgtagggccctggcgtcagacgcgcgtgggcggggcgagtgcggcag

SEQ ID NO: 49417 - DNA, 509 bp, Mus musculus
  source 1..509: mol_type = other DNA
cccccctttccgggcggaggagcctcgctcctcctccagctagagccctaggacattgtccccgcggctgtcacggtgtggacgccgagctcgcgactggaaaggcagggcgtcattcagcctcgcgcttttcccagccttaaaaggtctaaggccgcttcctgcagccagaaggtaaagcgggccgcccgagggagcagccgcgcccgggcctccctgccccggcgttggcggagccgctgccctaccgggcaaacccgcccaccgccattaccggcgcagagagagggcggctgcccggggggcggggagaggcttccttccgcgggccgcaggggcggggagggagggcagctcgcgggggcggcggggagcgacgtcgggagcggagcggagcgcgagtacgcgctctcctccgctcgccctcgggcacgggcgggccggccgggcgcgcgcaggggagcggcggttgcgccgggccggagtcaacggttagcggctgtagcctg

SEQ ID NO: 49418 - DNA, 518 bp, Mus musculus
  source 1..518: mol_type = other DNA
aggcctataggctcgccttattatgcctttattaggcaaacatgttgattggagtttgtaaaaactaaaagcaccttttggtttattaaaacacaaagaaaccttgctagctattttccaaaacaagtctgcaatttatgcagagaaatctcttaactttccctgaggtgtatattccatatagacgtgtattacagacattaacagacatttccattttacaaaagatttaacctagtatcttctgtcaaatttctagcacctactacaaaactgcaaacataaaagcttttgaaatagtcattttaagtgagtcactccctgaaagaatttacattacagccaaagtaagttgacttcagtatcttggagataaaacctgaattaatttgctcatctgcttagcatgttaatttcaggcaaattataatttgtacaacaaacttgtgattcaaacaatgtaacggggctcagtgaaaatattttagtagagactgcatctccccccccctttccgg

SEQ ID NO: 49419 - DNA, 328 bp, Mus musculus
  source 1..328: mol_type = other DNA
cacatcatggttttaagcacctataacctaattagatctagttcacaacgtggtcgagtctggcagggggtcatggccgagcggcggccacgcggggccccggacgcgactcccccgccgctccggctagcgccttacagggctcccggctggccagggagagtgactgctgagccactcggccgacagccgcccgtagaccggaggagaggggcgggcgagggccccgcagttcccgtcttaggccccgcccccgcgcgggaccgcgcgggcaagcaggcggcgctgaggcgactgggagtgcggcgcggcgtgcgcgggcacgagc

SEQ ID NO: 49420 - DNA, 563 bp, Mus musculus
  source 1..563: mol_type = other DNA
cagttcaacttacaatttgctcttgaccagctcatcgagtttttgacaaaatcttacgtataaatcaataaatcgtttgcaaacagttaccagctgatttttaataaaagtttctcttgaaggaggccctaaggggccgcttaaagaggggcccaggtcggctccccacggttgcagcccggcccgcccgaggcctcggcggccctcagccccgcgcccgctccgccgggagtccgacgcccgccccggcctcccgccgccgcgtgcctcccgccccggctcccgcgtcctgcggcgccgcttacccgggccgggccggtctggcgtccgagagaccgcgcagcgcaagggtcgagccccgcaccgcttggggcctccgccacccgcagaggaaggacgcccgcgcctcgcacacccgccgcagcgcgcgcccgccgcgcctgagcccgaggcaggcccgtcgctcgtgcccgcgcacgccgcgccgcactcccagtcgcctcagcgccgcctgcttgcccgcgcggtcccgcgcgggggcggggcctaagacgggaactgcg

SEQ ID NO: 49421 - DNA, 285 bp, Mus musculus
  source 1..285: mol_type = other DNA
acaaatacttaattctcgtagcagcgattataaatgttcaaggataaagagcctttgtagtagctgcttctattgaattacaatgtaaatgttgatgagtagttgttccgcagcgcaggaatcccagtccagttcaggaaaggtcgctcgactagtgtgtcaagtggcaggtggtgaactggccattctgcacttggagaagggccttacctgagcgcgcctctgccaatggcagctcacctgagggagcaccgcagccaatcaccgcgcagctcggccctcggg

SEQ ID NO: 49422 - DNA, 351 bp, Mus musculus
  source 1..351: mol_type = other DNA
ctaaaaagcaatttacagaaagttaaacttgctttgcttctaagtgaattgagagaaacggccattactaagttagtgttttgcctaactgaggcccaattttaaacaggttatctgatagagaatacttaaacaaagccatgcctttgttccccttttataaggccagggctgacagaagatatcagcgtacataacagctatggaccattgtgttgtgcagagaacacacttcacgacataatggtgtgtggtgcacagtgactaatatttgttcagtaattactatatctcaggcaccctgccaggcctttatatatatattacctaactaaggagtgatttaaagtt

SEQ ID NO: 49423 - DNA, 308 bp, Mus musculus
  source 1..308: mol_type = other DNA
ttgaggccagcctggtctacagaattccatgtgtaccgcttgtacaaaacctacacagaaagacattcacggtggatttgtttataattaaaaggttttatatgtaagcatgttttaaagagacagaactatcatatcacatttcttccctgcacttaaatgtttaattttcctgcacaaacatcatgaccaagaagcaagttgaggaggaaagcactttcatttggaggcatttccctaactccagcctgtatcaagttgagagttttgtgttggatttgaacattacaaacttaagttttaagacc

SEQ ID NO: 49424 - DNA, 272 bp, Mus musculus
  source 1..272: mol_type = other DNA
gtttaattggcttcctgttaattaagaatgagaacgaactgggtcataagcactaaagtcagtttatttagaggggaatttaattcactaagaaaaccacctcatgaatggtcacagcatgcattttctggcaaccagagtcacaacacaatggttttgcaatccatgtgtatacatacatgcacacacagatatgcacacacatcagtgacagactattgaaataatttcagagcctctgtgggatttgacgtcagccagaggcagagtct

SEQ ID NO: 49425 - DNA, 503 bp, Mus musculus
  source 1..503: mol_type = other DNA
tgaaaagaacctgcatttcagtcaggtgacttacgtacatgttggtctagtctgagactttcatttgtcgtctgagaaaagtggaggaccagccaggttctcagagcacaacatggaggaatgttctagaacatctttcatagtgcacactttcttaaaaatcgatgagaaagactagtcctgacagactgacatgcatcactccctttaaaatcccttcacagctgcgagaagcttcagaacccacaatattgatgctggagttttcagtgtttgtataaggaaataactccatcaaccccaaacacgcctgttgttgacaggctcctgaagtcaggtgtttgcttaaaacaataaacagaacctgtttctctgatttcaggtttactgtagttctagctaactcaaccctgcttagcttctgcaaataggactatgcatagaatagcttgaaaacccttgtgatggtttctatctgagctgcagcagaagccgagcagaag

SEQ ID NO: 49426 - DNA, 358 bp, Mus musculus
  source 1..358: mol_type = other DNA
cttgccaacacgcaaggccaggaatcttgctgctttgttatttttaaataagaaggattttttttaattgatgaaacgtcacctgggttaaccaacaaaaagagtccttgctaagccatcccttgtgctttttaaaaggctctcgaggatcccttgaataactgggcactgcgcttgcggtgggctaggatccgagggaacccggctgaggccagcggctgcagcagtacaaggcggggctgcccctgcacctgtgcatcccagcttcggctggtcccctcaccccgacagaagcagccgagccacatcgcacgggtccacggtggggagcgggggaggcgggaggaggaaaggcgcc

SEQ ID NO: 49427 - DNA, 421 bp, Mus musculus
  source 1..421: mol_type = other DNA
acaaaagtgttgaatctctttacaactttaacctttgctttgaaaagtatccgtagcaaggatattggttcgggttcagtttaatctggaacatgaaaattgcggttgtgaaagttcaataaatattactcagttaaacaatcacaaagacttcaaggtattttacagccactctggcagtctcttggactgactgggtgcaacctaccgtgtcgctggggcaccacgagggctagggaatgtcccggcgtgccagtcacctcgtgtaccaggtagtctggcacaagtaggcagactgcaaattccagtagacgctcaacttacgcagccgtcgccggagtggggaccctgctcagtgaagagagccagctgaggtaggcggatctctggcggggcgggccggggccggctgaggtaggcg

SEQ ID NO: 49428 - DNA, 371 bp, Mus musculus
  source 1..371: mol_type = other DNA
tagaattgttctgttcacaagacaacctctgagtcatgaatgatagggattcctccattgggagtacccatggcaggagactacgctcaaagaactttggggaaatctcctaacttcttttgttaaactcaaaactttgtacaagtgttttctttcccttctgcaaagtatatttgtttgaatatgaaatctaaaaatatcaaatagtccttctgctcacagtgacatcaggcttaaagctactttaaatgaaaatttctatggtactgtaaccctgatctggcatgagcttttgaaacctcaaagctcacattcaaatatattatgagcctatggaggctgtctatttactagataccagcacagtgtta

SEQ ID NO: 49429 - DNA, 474 bp, Mus musculus
  source 1..474: mol_type = other DNA
catcattgaccagccaactaaaaattattagtaaatcttgatatctaatttttcatgtattctcaaaagaacttcctaaactaaagaagagaagaaaactgctctgctgtgcaatcattaactaagttgtagttctgataccccttcacttccaagatcctctatcaggttttgataaggctcttacgtaactgcctgccgtaggaagcgaggaaaagaaacccggcgcgcgtgccctttcgcccggcttcccgagcacgtgctctctggaacacgccgccccgccccggggggccgggctcgcggcccagcgcgccaataggcgagcaccttacagcaccgtggcccgacaacgttaagcggcccaatcgctggggcccggccgcccgtttcccggagccccgccccgcgcgcagagccccgcccccgcggccccgccctccgcccctcccccgccgatcggcgcccaggctg

SEQ ID NO: 49430 - DNA, 408 bp, Mus musculus
  source 1..408: mol_type = other DNA
tatcaataggggaggagggataatcgatgatcctttattgaaatgaaaataaaagctccctaggacttagtctatcaaatctgaggtgagacctcaggtccaccctgagcagtagaagccaagagcttctgggctccagctagtggagaactgatgttcctggctagctagaaccctagctggtagaggacggtctgtgatgtatgagaccctgggtttgatccctggcaccaggaaataataataataataaggcagacagagccaagtggagccatgactgtcttaagtgagcgagctcttggtaggaataccttcctgggagaaaccctgaggagggtctcaggggttgtggttggcatggtaaccaagagactatgacatacaacacaagctttaaagtaagtg

SEQ ID NO: 49431 - DNA, 505 bp, Mus musculus
  source 1..505: mol_type = other DNA
cggtaagccgagccaggacggtcccgaaggctgccgtcagcatggactagctgccggctcacaaagcggatcgttggctgctagcgtggcgcgcaggcgccgcaagggcgagggcgcgatccgcgatccgctgggccgcgcgccctctgccccgccgcagcccgctggggagcggctgcagcgcgagggcgggaagcgagcgccgggccagcacctgccaggcccggtggtcccgccctaggccccacccccgtcgtgcggccgaccggccgtctgtgacgtcagcagcctctgcggagtgacgaggctgaatcctctctcggctgccgccgccactgctgctcagctggtgtcggtgccgcgcgatggcccaggccgccttgggtacgttatctcacgtgagtaccggacttaggggcgcgggagggtccggcgcctgggctgggccacgccgccctcggtgtccccgcagtgccccgcagccggcggcctcgaacatggcggc

SEQ ID NO: 49432 - DNA, 594 bp, Mus musculus
  source 1..594: mol_type = other DNA
aacattgtattttaaacttcaactccgagcgtcgggtctggggctcgacgggagggacgcgcagaggcgggccctgctgctagtgcctgtgctgcagatgggaggacgagccagcgcctgccgccttgggcgtgggcggtgagtgcgagcagtgttccgtgacagggctcaagaacgtctggtggctcggagccgcgctcgcagcctccgcctccgcctcctgctcggggtcccgcccactccctggcgggcccagacgctgtgggcgcgaaggggactgggcggagcgggcttcccttcccaccccccacgtggggccggctctccgcaaagcctagtcgccgccaccgcgcctcccagctatgccccgccgccggcgccgcccccgggcatgggcggaggactgatcaggtggtccccggagttccccggggctggaccgagggaacacggtgcctcgggttgtgtacacgctccactgacagagcctcttgcagccgggcagccgctgatcacgcgtggctctgccagctcattggctgaggcctgccccgccctctaccccgcccgcggcgcggggcaggcagagcggct

SEQ ID NO: 49433 - DNA, 531 bp, Mus musculus
  source 1..531: mol_type = other DNA
ggagcacctaggagcacctattcaaggctagcctggtatataagcttgggttgcacagagaaagcctttctggataaagagatgtgcctttaagtcatgtaacttcccgctttaatagggctgggtctgactgcatcaccctttttgaaagtaaccacaccggactggttcttgtggccacggggacggagctccgcaaccgggaacctctccctcggaatacagtccccgggcatagtatcggtaagccgagccaggacggtcccgaaggctgccgtcagcatggactagctgccggctcacaaagcggatcgttggctgctagcgtggcgcgcaggcgccgcaagggcgagggcgcgatccgcgatccgctgggccgcgcgccctctgccccgccgcagcccgctggggagcggctgcagcgcgagggcgggaagcgagcgccgggccagcacctgccaggcccggtggtcccgccctaggccccacccccgtcgtgcggccgaccggccgtctgtgacgtcagcagcc

SEQ ID NO: 49434 - DNA, 479 bp, Mus musculus
  source 1..479: mol_type = other DNA
cttaacctcagagccatctctctctcgaaaaaaaaaaaaaaaacattctgtgttggttcctatctggctgggttgacaatggaaatctatgcttctggagcttcactttgctaagctgtaaatctaaaaactctcaaccaatgagatgtgcgtacccctaaaccagacagtttggagttcctgtagctaattctaaaaaactaattaacaatgtttggtgctgagtaactaaacctgaacactttatcactttatggaacgaagtgatatactgaagtggattattagaaaaaatttccccgaaacctggactgctggccaaccaccgcaggtgcatctggaggagcggcaagctccgcccacccggaagcccgctctgcgcgctctctcagccccgccttctccggaggcctggccgcatcgtgattgcgcgcagtggtgcgcgcgcgtaggcggagcggcgtgcgccgcggtcagct

SEQ ID NO: 49435 - DNA, 553 bp, Mus musculus
  source 1..553: mol_type = other DNA
ggaaagagttctccaaaattcatctctagttgatgtttccagatttcaaatactgaaatgtgacatttttcagcagcacagtgattcagctaacagcagtctccatttaaaagttattttacaggctgggactgtagcttaacatagtaggcatgctagtaccagtatgcacaagaccctgggtttgtgtttgccaccagagtcctacatatcaggcattattgaatgtaaaggactcaaaaattagtaaccattcttgtattcatttatcatgtctacatagactcaaaaccacgttgactaaagcacgagctggcacctgcctccccgagttaataggcttttcagccaagaactcaggaagttcctcgctactcgaaagtgtgctctgcagggcacttccccaacggcctgggtctcacgcctgggtccgcggtgcgagcggaggcgacagctcggcggcccccgcaccgcggccggctgggctgggcggggcgcagggccggtcccgccgccgcgagccccaacctgcccgcccgacctggcggcgcag

SEQ ID NO: 49436 - DNA, 381 bp, Mus musculus
  source 1..381: mol_type = other DNA
agttagcccacctgcgtccctgcccatggagggagcgtggaggtcgcctctccctctccctggataggggttgaagttggatagaacttttcaaactatattaatctgatggtgaacctccagcactgaatgttggctattttctaccagcctcagttcacctatgaatggagactccaggctacactatcgattatttgagtcataggactcttatagactgttatcaaatgtcacttttttttttttttttttaaataatgagccttagttttttaggaatgaaggaacagttctgcagcaccccgcgggggtctgggcgggcggagctgctagacccgggacccaggcctataacagtatgcaagctccgggcgtcca

SEQ ID NO: 49437 - DNA, 635 bp, Mus musculus
  source 1..635: mol_type = other DNA
aaatactgcaaactaaagaaactttagtgaatattttaatccctttatacagccaaacacgtgacatgagggtcaaatgtgacatttccctatcctttatggttaggagacacagggaaagccggggtccccttcctctcccccttgtagtagagtctggggagacgcaggctcttggatcttcacgaggtcgagcgggtgcagcgccaggttggacaccccgccaccctcgtaccggacgtggcggaacaccgcgctccacgccgccgacccggcagccgactggccctggcctgtcatgggctccgggttcgtcgacactacggcgtccagcgccgccgacgtggggcgtgatgtagtggccgccaccgtggcgactgtcgcggcccggggcctggaaccgcaggacgcgagcccacttccgggaccggagcccgggacgctgctgcaggcaagtcacacccgcggctcagagcggagcttgcttagccccgcccagcaggcctggccccgcccacagctgcgcgcgctcgccctcgggtcaagacgcgagcgacagctgaagccctccagctcctagccgcgaggtccagctgagccatccggctgccactctgcggagccacgtgacagga

SEQ ID NO: 49438 - DNA, 630 bp, Mus musculus
  source 1..630: mol_type = other DNA
tgaaaaatggtagaagaaataatatgtgtaatttttttatggataataaaaacatttggaaatcccttacaaactgaaaatatactttatgaatatatatgtgtgtatgtttgataaatagattgatggtcaccaataatcaaaataagggccctcttagtttaggttttatctgacacatagtcagtcttagagaaggaaatagccactaattaaagtgctgtgaatgccatgactgaaattagttaagaatgagtgataaaatatctctgattatggttattttttaatttatgggaaagattttatgtaatatgtgctatttagttgaattttaattgagatagtaagaatattttttctgtaattacataacccactatatagtcaccatatatgggctttagaaagattccagaatgaaaattattcacttctttttaaaaataattttagacatcttaaataagaaattaatattgctgcgccgtagaatcatgattctgaaaggagatcagagcacttaagtgttttggtcctatgcatttccaaaggagaaagaggctgggaaaatgcataatttctcttcttttccagtagcaacattgagaagatacgctggcagccaga

SEQ ID NO: 49439 - DNA, 433 bp, Mus musculus
  source 1..433: mol_type = other DNA
aaagattcaaaataattaacgtatctacttttcatttaagaaatattaccaaaaaaaaaaaaaagagagaacctttagtaacgcagacagggtttctctctgtagccccggctgtcctctctgtagaccaggctggccttgaaccgtaactacttcccactagaggaaaattctcacaaaggaccagccccgtgtggacgcagccgcctaggcggagagggaaaccgagaccagagcgctggcctcccgcccctttcgagcccgcgggcttcctgtcacgtggctccgcagagtggcagccggatggctcagctggacctcgcggctaggagctggagggcttcagctgtcgctcgcgtcttgacccgagggcgagcgcgcgcagctgtgggcggggccaggcctgctgggcggggctaagcaagctccgctc

SEQ ID NO: 49440 - DNA, 566 bp, Mus musculus
  source 1..566: mol_type = other DNA
gacttttatctgatcagatcactgttgtcttataagcatctacagatgccggtattcattaggatcttagttaaagatctgaacttgaatatttgaatctctcactatttcaaataaacacacatacgtgtgtgtgtgtgtgtgtgtgtgtgtgactcctagtaaaatgatatcaaatttgctttgtgttcagagacagatttctaactaaatttatgttaggatgtaaccttttactgtaatgttacacttgatagggttattcttagcaacaatgagcaggtgattgctttatataaagaaagaaggaattaatttcctgccatgcataaagagatcttcttttgactgtttaccattactttaaaacaaagttcaaaagaaagggttaatgtaagctttcataagacctggtcaaaactggttataaaactactaagggaaagttttactagaattttgcccattctcaggctctgtacatgccagtgaccccaggccagaacccgagttgcgccttggcaccagaactacggtgccgccccctctgattggcggcgagctca

SEQ ID NO: 49441 - DNA, 563 bp, Mus musculus
  source 1..563: mol_type = other DNA
taatttaatcaggagattaattgtaaatgtcacttcttaatgtgtaggtgtgtctttgaaattctgacaagcttgcaaatgcatatgggtaataattttgaaaatatgacttgataccttgacatttctatagcttttcactcagtcatatgatcaaaattgttattagtaataatatttaaggcaacatccttcttagagacatttgaatttgcctagaaattgtaaatttttttgcttttaaatttttttcttattagatatactagagcgtatgatcttcgcgagaccaagggccaaactttcacagactgattgactggctttatacaaagtttttgagacttgtctacatcttttgaagaacaatggtcttttcagccagagaagtaaacttctaagctgataagtactatacctagtagcttcagcccagaaatctgaggtggggcctgagggcaagaccaatctgccctccccatggctggggtgagcttctacaactcattgttttgaaaatatcctattatgttatttcctacattaaataacttcgtcacttt

SEQ ID NO: 49442 - DNA, 247 bp, Mus musculus
  source 1..247: mol_type = other DNA
tccgggcagtttcagagagagccccagtggcagcagggacatccatctcatgctcctggtcaataattatataaccttcctgaggttttgatgcatcaggaaattcgacacaagcatctctcaagggcagcccaatcacagagactgcagtggttacattgttcaccaaggaaccaagtgaatttctttctttcactaaagtccaggtctgcggcagggcagccctgccctgaggtggagctacatc

SEQ ID NO: 49443 - DNA, 309 bp, Mus musculus
  source 1..309: mol_type = other DNA
accaggaaatagttgttgggtcttacctgattgaaaaattaggacaagatcaaatcttttattagctccaccataaaaagttagtatttcctattagagatgatagtgagattccgggattttactatttcaaatgggatggtccgggtccgcagcagtctcctgggaactctgacggtctcctgagagcggcctaaccttcctgccaagtgccctgctggcagctgcgaccgaggccgggctgtgagtttgcatccggactggctttggatgcagccaatcctgcccgggcgcgcccctccctcgcgc

SEQ ID NO: 49444 - DNA, 507 bp, Mus musculus
  source 1..507: mol_type = other DNA
agtgccagtgtgtcactacagacagggggggggtcagggatatccctctttccacgtcccccagattagaagcacctacttcagcctagaggatctccggggagggccaaggccggggactgcggcggagctcggtcagagcacatccccgcccctcgagcccctggaacccagcggccggcgttcgcgtgctcgcacatcgattggcactgcctcgctactccggctccaggcgcggcgaaatccgcccgagctcggccgagtccagggaagcgcggggcgtgcacggatgagcgccggtgccggctcgcgctcagtctggcgggtggcggcgccggctggttgtgcggcgcgaggccggagccccgcagttgccggccctgtcgcctgcggctggcgcgcgcgctgcgcgtccctgcccccgggaaggccggcccgctaggggctcgcgcgaccgacgcagggccggcgggagggagcgcgcgcgggcggccccgcccctccccc

SEQ ID NO: 49445 - DNA, 391 bp, Mus musculus
  source 1..391: mol_type = other DNA
ccactcactaccccttcaagaaagggccgaggtccagtctacctagttgtactcataatttcccaggcagagttggaatactctttggccctgaggctagggctgctgggcagctctggggaccggggacgggaaggggtgccataccccgcagcctggagcacggtttcccagggcaggggtccaggaggacgccagctcccggagcccgagagttcgctgcggggacgcgcggaaagggggtgcgctggcagccggtcccggagccgccggcgtggtcgcctccagctcgtggccgtcgctctgcagctcggcgccgcctcccccgccgcggatggctcttggtagcttccacgcgggcaggtccggcaagcgctccgcggccccggcg

SEQ ID NO: 49446 - DNA, 489 bp, Mus musculus
  source 1..489: mol_type = other DNA
ctgagatgatggagttactttgagctcagtgcacattgcccataactcactgcagtacagtgagcaagtcaggctcaagactcactccttcaatattatatgacctattttttaaaataattaccatttatagtgacaaaaagaccatactaatctattttgattgcatggcatcaataaaacactcaaaaataaaattgacatatgtgacattgaatatttctgattattttttctattaataattcccaataatcttccatgattaagatgaaatgtttgaaaaacttcaaatgttaaccattaaggtaactgttgctatggattaatctgtcacagaaatacttgtgtggctatatttaatttatttataaacttgtttccacaatgcttcagatatatctgtaaaataaattataggagaaatctaattttccagtctgttctccacagttttagatttgatagaagaaacctgagttgttcatt

SEQ ID NO: 49447 - DNA, 488 bp, Mus musculus
  source 1..488: mol_type = other DNA
gaagtttagaagttcatttaatgctgtaattgaaacctatgggttaagacttgagcctttaggatccagagctttggtgaaatgccaggatggccatggttcagtcaattgaaattcaacttttatgtaaaacaagataaaacctatctgggaggtaatctctgagtaagagcacatgacagataatgcagacagtattaccaagagttaacagttattctaaagaacatgttactgtagcacaaccatatccagtcatttattgttgtgaaagaacttgtgacccctgaaggccttactgctgagatcattttaaaactacttcatctatagtgccattttaatgtccctttaagatgttgaatcaaatgttaggaaaaattttaaggaacaagatgtattgactactttaaagaagtttgaatccactagatgacttaatttatgagctgaagatttgtctttgaccatgtaaaagaaattaaagt

SEQ ID NO: 49448 - DNA, 651 bp, Mus musculus
  source 1..651: mol_type = other DNA
ataaaattctatttgtattttaaatattttaaataaactgtttaaataagtactttaaaatcatcctttgctattttctccattttaagtgtacagttaaatatattctcactgttctgaaacaggtgtccagaattttcattttgcaactgtgaatttcagtactttatatacttcataaaagtagaattctacagttttttccttcttcaaactgcaggtcatgaccctcacatattagtgaggttgagtgacttccaacaatattcttaaagtttatgcatgctttagcatgtattaagacttccttcctgattaaggcggagtctccttaagatcctgctctcaagtatcctgaatatactcccggaattgacagattctatagcagctcaatttttgatctcctggggaaatcccattctgacagcttttagccttgaaaggcacttatgattatctgtgaagcattacacctttttcattccattttgatataacaatgtatttttatgtcagaaaacatagtacgacttaagctaggatttcataaggaatgatggattccaacatgtttagctgtagaagctaaatattaccctcagacattccttaagtaaatgaataacttgtccttctggacctaaagca

SEQ ID NO: 49449 - DNA, 433 bp, Mus musculus
  source 1..433: mol_type = other DNA
tttcagaaaggtttttaaaatgcaaagagtactgagttctgtgggcgcactgtgcaatcagtttgccttaaaatgaaaggaatatttggacattaccattatagcatacataaactgagctccagataattttagtttacatctaaagtaattatagtttgcacttaattttctaaaaaataagcttctggttgtataagtacagcatatgtagacacagtaaatataagtaccattcaataaataatatgctagaaaacatttttaaatgatctttttgttatctatgagtattctcataaaagattgaattttataggattattagctataaagaataaatgtgtatctcttacgcagtgcatgccttgtaactgtgacacttttatgagcttaggactatctgttcaatggatactacttagtgattagc

SEQ ID NO: 49450 - DNA, 457 bp, Mus musculus
  source 1..457: mol_type = other DNA
ttaatgtcctaagcaatttacaaaaaaagagggctcatttaatttgcagggtcaaaacacactgacaatatttaaactccgactgcagtctcaacattgaaagtacccatcacttcactcttaaagattgttttaaaggtgcaagtttgatccgctgcgggcccgcggagctcctagaacttctggtacgcctagcagtgtctgactgctagccccacgtcgccccggggagaggggagaaggctagggggtcctcccttccgcagcggtccagaaagtccggctgggtccgggacggggcggggcagggcgggagggggggagccggcctgctccaccgcggagggacggtgggggaaagaagagccatgctttgctaagttaagctctgccccggtgcgtccggactcccccgacagggcggccgatggtccgtcccgggccgaaggaggaggcc

SEQ ID NO: 49451 - DNA, 784 bp, Mus musculus
  source 1..784: mol_type = other DNA
tagaacttctggtacgcctagcagtgtctgactgctagccccacgtcgccccggggagaggggagaaggctagggggtcctcccttccgcagcggtccagaaagtccggctgggtccgggacggggcggggcagggcgggagggggggagccggcctgctccaccgcggagggacggtgggggaaagaagagccatgctttgctaagttaagctctgccccggtgcgtccggactcccccgacagggcggccgatggtccgtcccgggccgaaggaggaggcctggcccgcgccggtcgcctcgaggcgcggagccgccgcccccggctcggcaggctgggcgggcgctgtcgcgcggcggccgcggcccagagaaccgaggcgacgggcggcggcatggactacctgaccacgttcaccggcaagagcggccggctgctgcggggcacggccagccgcctgtgggggctcggcggcggcggggaagcgcggcaggtgcgcttcgaggactacctgagggagccggctcctggcgacccgggctgcgggccggaggagctccgaccgccctcgccggccagtcccgagggaccgggtgagtcccctagaccccgcggggcttcgcctcccggcgcgcggacggggaccgggactggggaggcggcgccacgggcaggtgtgcgggcgcgcaggtgtgcgggggccccgagccttgcagctgcgtggtggcccttcctgccccgggcaggcgccaccgactcacgtccatggagttggacagaac

SEQ ID NO: 49452 - DNA, 571 bp, Mus musculus
  source 1..571: mol_type = other DNA
aagaaaacttgttctacatagcaagagactttgtctaaaataaaataaaataaaataaaataaaataaaataaaataaaattcaatagtgccattattttgtcattatatggatttaaccattttgatattttaagagattattttagtcataatttctaaaatacataaaagtaaaatttaattttatgtcattagaagagtttactgtcttaatattaatatatatatcatgctaatgtatattaataggatgtcaacaatagtaagcctttcgtgtcaatacttccatctggaaaatgaagatctgagcagacagtcttctataatttgtttctaattgttatagattaaaaggaagctccagcttcgaacctctcatgattttaatctcatatattattatctgcagggagtaagataccttttcactctgctattaaaggagaccaaataacagctgtatctgagaactgtacgctttccactggaggagagaggagggaacatatcgtgtcctttgccaccagaaatgtccctcggacttgtcagggtttaaacaagaaatactt

SEQ ID NO: 49453 - DNA, 498 bp, Mus musculus
  source 1..498: mol_type = other DNA
ttctaagactgaggctcccagatgacaccgtctctgtccctaacccagggaaccagggcttgtcaaaaattagcacagccttcttgtggtgggtgaactcaacttgtgaagttaagttcctttaacttacaaatacaatctttctaaacgaagacaatatgggtactttatacttattctcattgcatacttttattaaaagttggtgggggtaagcattttatgaagatttcccatggcagtccaagaagtgcgcgcttactttttcaaagttgggctttgacagtcaaaatgcctaagataaactttaaaagttggcataaaatttgctaatgttagacgcacattagcccaacccttggttttttcttttgcaaacactgccccccggaactctgagctccctgcagagaggttagaaaccgaaagcgatcacttactttttgcagcctttccatcacatgctccagatgctgaagtttctgggaagagaaactc

SEQ ID NO: 49454 - DNA, 546 bp, Mus musculus
  source 1..546: mol_type = other DNA
caaatatttatatggctttctttcttaataaaaatcgcagaggtttcgcttgtgtaagccattggcacacctccacaaaggatgtgtgtggaatttccataccagtgttaaaggcagccatagcaatgccagaggttcttgtgaaatatatgattagcatgtaccacaggaattaataattctcagtaaccacatctcaatttatactcagagaatatatcccaaaaggtgctttcaaaatactacttagtatgcacatgatatgttgctttgagtgacaaattatggtaatttccttgataattttattctccttaaagcctatgtaaatacaaaggggagaatgccatttctaaaaatagtttttaaatgtcttttctggagtaattttttaaatttaataattttatacaattataaaaaaatccattggagattgtgccaaattagggttcctcaattaaacaataactttgaaaacatacttctagcttgcttagatgttagtaggtcagcaagcacacccgaacctattaaggtgaggct

SEQ ID NO: 49455 - DNA, 327 bp, Mus musculus
  source 1..327: mol_type = other DNA
taaagagacgtctatattgccacgtctaatattatagattcttatcttttgctcaaagaagacatacattaataacattatagattcttatcttctgttcaaagaggaaatacattattcttcactagattaaaattggtagcacctaatgtttttaatgagtggatttctgaagaagaaagctcccaattttttagtattgcaaagtatcacatatgtttgtgaaatctgttcaggaggaaagtagaaggtaccttcagttccccatcaaattcttctgggtgacaagggccctcaggacccaggaactctgaggcagcctggctt

SEQ ID NO: 49456 - DNA, 411 bp, Mus musculus
  source 1..411: mol_type = other DNA
tcatgcttttaaaaacacccatttattttctaaagaactgatccaagatttaaatattttatttaaagattctccactcttggtcaatcagacaggataagactatctacaatctccttcagaaaatgaattagttggcagaaagtaagacattgtgtgtgctttactggccaaggaagttaaaaggggagacttatggtcgtgtgacagccgcagctccgcgtccctcctgtacgggccaggccgcagattgtggccgggcccaggaaggaaccagccccagtgtccactcggttcgggccagggagagctgcccgacggctctccggggattctgggtaattctaaaccatttcccagggccttcgccatcttcctagaacgacttcacccgtcttcctctcatttgta

SEQ ID NO: 49457 - DNA, 400 bp, Mus musculus
  source 1..400: mol_type = other DNA
gaatggattacaggttatagtctattccaaaataggtgatcttcagtataagctggacctgcctaaaggtccagattaaatggatttaagataggtcttatcttaaatagcttaattaagaaaaatctctcacagatgtacctaactgcttgtgattttgttagattccaaatgtagtcaagttgaccaccataaatagccatcacatatatttcagtgatctagtttctataaggtgaattacctagatttaacctcccttaattttatgcatggttttagtaagttagacctagttgtagtttcaaatcttttctttattggtacaaaccacgcgcaactgctgccgttgtcatcagcacgcttgggcggggccactactgcacatgcgcagtgcggg

SEQ ID NO: 49458 - DNA, 526 bp, Mus musculus
  source 1..526: mol_type = other DNA
tttaaagtaggtctgcatttgagctttcagaaagataatatttacactgctccgttttatcagagcattggtatgaatttgactgaagcatttaatattgttttgaatgaaatatttttttaagtctgcttagtctgaggagaaacttttttgtttatatggagattttagtcaacaatagtatcacatcatatatttgatattttggtaaaagctattaccttccaacatggtaactattagaagagatagataagttaattaattgtagtaataatctcaaatcattaccctatacaccatatatatatatatatatgtatatatatatatatatacatatatatatacatatatatatatatattcttttgtcaatgatacttcattaaggctgaggtatcattgaggacacatttgataaaatcgcaggaaaagtagatagttatctaaagttgcagtaaaagtagaaagttacctcactcagcctcagctgtcttacaaatgagaggaagacgggtgaagt

SEQ ID NO: 49459 - DNA, 524 bp, Mus musculus
  source 1..524: mol_type = other DNA
aaacacattatttccaagatgtgctgctgaatattactttgagtaaacctatctcaagagtggcggcaatcttctaatgcttagaacttactgaatcagtgtttcagctcagatattctgtaaaattgaggactttcacaatacctctaaaaatgaatgaattaggatcccaacttttaatttattaatacattcaacagatccaagggggagaaactgacactgttactctcagtgttcatattctgcaacgactttggaatcgataagatttcaaatgctacttgagccctcttcctcattttaaaaaagaaaattgataaaaatcttctactttgaaaatgtgttttgactattcaatatgacaaagtatgcaacttgcttccagaatcctgtggctgcagaggccagagctcgaagctcaggcaggtaatgggaaactgtttcccagcctgaactacatctcccgggatgctcagcagaggaagcaccccgccccgccctgccccgccctgcccgattcg

SEQ ID NO: 49460 - DNA, 465 bp, Mus musculus
  source 1..465: mol_type = other DNA
ggctttagacagctgaaattcaggctggcttgtgctttttctaaaatagtacctgcagcaagcagagggccttggagcactacaagtttcatgacacaaggtcttgatatatagcccaaactggtttcaaattcacagcgtcttcaagtcattttttaaaaataaaatttttatatgagcctcagaagctcacagtaaaaatggtttgaaatcaattttaactcatttttcattcatataaaatgatagaagggagcaaacagctctcaaaaggttttgcttaaaaatttatttcagagcagctcaggcacaagagtttctgcggaacttagagcatctttaccgctcggctgctcggtgatcaggcatccacaattcaacagaagattctgaatcagtcaggattgactagtgtgtgtgtgtgtgtgtgagagagagagagagagagaagagagagctctcatt

SEQ ID NO: 49461 - DNA, 341 bp, Mus musculus
  source 1..341: mol_type = other DNA
aatttttctctcccaagaaatgattctgcgtcagaagacacgtttactaaaggtaaggtttggctgagctgcggacgcctaggccagcccacagtgccgcggctaaggcgcggaaggaaagggggcatcctcgggtccccgcgtggacggccgctctaggtgcagaccggcagaaccgggtgcgagagggtgccgccgatcccacctgcatcaagctccagctggtagcagggcagcagacagcttgtagccctcgaagcgaactgaggctgggaaacggcgtggttcccatcccagacgactctgcggcgccacgtctcttctgggaagtgtagcatgcc

SEQ ID NO: 49462 - DNA, 512 bp, Mus musculus
  source 1..512: mol_type = other DNA
ttggagtcccaccttatttaattgtacactaatatctgactggcgttcattctttaactgcattcaatttctgggtaagccatagcatgcacacgctttggatttcatatccttatttctgaagggtaagtaagaaaacgaatttcaaactagtctttgagaaattcttcattttcaataaaaaacaaaaaagcaaggttaacttttgagcgcatttttgccatttaaaagtcaggtttaagttgtcttgtctgtatggaaattcagactacaaagaattggcttaacatttccaaattaactgcaaaagtttagacagtgtcatggcaagtcacttaatgcctaaaggcctcagttttctcactggtaaaaccagggcgctagggactccctcccggttctgacgggactggctcccggccaactccagcagcacgccctgtcggagagccctacaggcccgcgagcgagcgagcgagcgagcgcgggtcgggaaaggagcctgggctggg

SEQ ID NO: 49463 - DNA, 412 bp, Mus musculus
  source 1..412: mol_type = other DNA
ttggtcaaacatgtgagggccctaaatgcttcagcctgcatgtccacaattgggaaccgctgtttcctctgacaagagtaagaatactagactagtgctagcaaggaaagcatcagtggctgtcatttatgtccagctatcagataaagttttatttttatctttgtcaactgaggtggtcttataattaatctaaggcaattaatgataaaaatatatagttctagaatttaaaagaaggaaaataaaggtgggagatctctctctctctctctctctctctctctctctctgtgtgtgtgtgtgtgtgtggtgtatgtctgtatctgtgaaatcccagacacaccgcggacgagctgggggcggggcaggtctctggcagccaggttcgccctggcttctggggtgagtc

SEQ ID NO: 49464 - DNA, 442 bp, Mus musculus
  source 1..442: mol_type = other DNA
ttactttcagttaaaaactggactaagatttaaacaatcattttgagacagagaggcttcgccaatgtttcacaatctagatcttgcgacttgcacgtcaatgacgtatctatccagggcggagctagggcggggtccgaggggcggccatggcggctgcgcggcggccacggcggctgcgacggagcgcgcgcccggctttgaatgagcggagctgggactgagctggcggagcgcgagctcgaggcagacagcggctgtgcgcgcgcgcgcctcgtgagcgcgcgtggcccgcggcagctcggagcctccgccgggcgggcggggagggggaggggcaggtgagtgtgtgcggcctgcgcgcgcccgcgaggggcccgcctcctgacccggtccggcctgcggctggtggccgcgcttcccggtcaccctctgggtcccg

SEQ ID NO: 49465 - DNA, 380 bp, Mus musculus
  source 1..380: mol_type = other DNA
tcaagagatgttctctctttttctcagttgaacatagaaataatgaatatttagctttccttccatgctatggccttcatctttgcaatggtcaatgtccagtggaaaccctttgcctgacaaacagtatttactcaatggatgatcaccttcattgtaatccaaaacaaagtgggaggagtttacaaattatacaacttccaagcatttgaatcatcctgatcaggaagtactctgttggaagtgtctatttctagaaagctcctgtttggaaagcggttggtcctacaggaacaccagagctcccctgctcttctctgcctggcaggtactagtattgcaaatgcgggaaaaagtgctcttccacacatgtaggaggc

SEQ ID NO: 49466 - DNA, 427 bp, Mus musculus
  source 1..427: mol_type = other DNA
caggtgtcagaatgagactgatcactgctcacactgctacctagaatattctctgaaagccaatcaccaaataggatttgagcatactgtcagtcattcattttgagcttattaagcatgagctttttaaagcatcacaagtgcctttttctgcctgtcctgtaaaaataatatctgcagatactggaccagctggatctgacctagccggtgggtattattgtccctcctgttaacaagggccaacttgaagaagtcctctacacacaggaattccagggtctcctttacttgtagtcaggcagcagttagagaactgggaatgagtctgcgtgctgtgtctcaggctcctgctcaggtggaccataaatggaccagtggacacctctgggctggcagtacgcctccgcctgcccgcagtgggtcg

SEQ ID NO: 49467 - DNA, 174 bp, Mus musculus
  source 1..174: mol_type = other DNA
agtgcatctttgagaggcagttcattagggaaatggccagactaggccttctcccacttaatacagtcccatgatatgagaaactacctcacatctgattctctctagctgaaaactcatttgcagatccatgcagtttcttttcttcatgacgtgttgtaaagcacgtcagct

SEQ ID NO: 49468 - DNA, 416 bp, Mus musculus
  source 1..416: mol_type = other DNA
tcttttctagaaaaatccactgcactggtctagagtaagctgttaacaccacccattatgagatgttcatttcacctcggataatctttatgaaaaatccccagaggccttttggagacatcttcgctttctaaaggcgtcatttccaagcctggctacatgctggtctagccaacctgattgtagggacactttcgccttggtgtccctgccccctgggtgcctcaatggaagggagtcagcagtccactctgacttcactgaacccaaggcattggttgcggtgcccgcaaacattgacaccaaagctccagacagtgtccccatgtgctggactgggccgccggccggcgacacagcgcgtggcaagcggtttgcgctggggctggaggaaccagccccggcccgctccgccc

SEQ ID NO: 49469 - DNA, 270 bp, Mus musculus
  source 1..270: mol_type = other DNA
agcagtttctggctaagatctatgctgttagcagtttccattctggactggtgaagtcagaattctcacttgtagaccagacagattaaagaaactggctgagcaacacccaggtgtgccccagccctgtgtccaacaggttggctgaacagaatgtctcttctgaggaaatgtgcagtgtccctgtgggcacccggtgtgcagaactttctcagctaggaactgggtaccccggaagccttcagaccggaacagactgtgtatcctggg

SEQ ID NO: 49470 - DNA, 338 bp, Mus musculus
  source 1..338: mol_type = other DNA
ggaaaacggtgttatttcttgcagaatatgtccttcacacttgcaagtgtgcaccccttagcttatggggaatagttgaactgcatttttgatgaaagcaatctactggtttcttcagaatcttacctttccaagattttgtagttgtgctatcaaattaaaacaatttcacaagctgttcaagaaattgttattgttatcaatcctattatcttctaatagctagaaagtaaatggccatgtatttaaatgcttttgctcagagatcagactcaggagggcttcctcccgccctagatggggctcccccaactggcgggaaacggaggcactgcagt

SEQ ID NO: 49471 - DNA, 334 bp, Mus musculus
  source 1..334: mol_type = other DNA
tatgtctaaggaggctcgagatgggatctggtcccacattttaagtgtcagtctgccagaaagatactaatgactattgtcatgttcaggaccacttcagaacatgatatacagttctggacccaaaggatgccttcttctgcctgcctctagccgccaaaagtcagggcataataggccaagtcacctggacttgcttttagctgcttgaggcaaagaactgtacttagctagaaaagaaactgttccatattctctcaattcactgagatggcggctccattaggcagagtggcctgcctgcctgcggatcatggccacggttgctatgctg

SEQ ID NO: 49472 - DNA, 268 bp, Mus musculus
  source 1..268: mol_type = other DNA
gagcaccaaagctattcctccctaggtaggggcaaagaaagaaaaaagatttctaaaagtattctttaagagaccgctctcctttggataccagtcattaataacaaacatttttgtaggtccaaatgcttcataataatctttgaaataagcaccaaatctctcccatgaaatttaaaatttttctttaagctcgagttttgagggactctttaagccctgactcaaaaggtgactgctactgtctcacaatgggttggactactgc

SEQ ID NO: 49473 - DNA, 363 bp, Mus musculus
  source 1..363: mol_type = other DNA
ggactgccaagtccaaatgtatagacatatacattttgcctacatatttgggacaactcagaattagggaaaatgagctttctctagatatcacttaccccagcccgcacggcaaataataaaatccgcgtcatgttttttttacacctaggtattctcatatgtaaatttgtgcgtgcaaataaattatctgtgatttcccttctggattaaatcaaagtataatagatgtctaagatatcaactactgtagtaaaaatggcagaatattggaaaaataatccaagccccgagatttcaaatattgagagcagagctgggcttttagaagctcagtagcggagactctgtgaggttgctgtg

SEQ ID NO: 49474 - DNA, 458 bp, Mus musculus
  source 1..458: mol_type = other DNA
aagcccaagaactgtttacttagtttttaacacctctcgatctttagaagttaaagggaaagatagcctgttcatttcatgaactttatctaagaaaagtatgtcatgcccgaatcagactttcttatctgctggcttctcagctcagaatgaccacggccgaggtatcctaggagcactttgagagttcttggcattctccaggaagctcgcctcggctgccacgcattgccccccgcgccccccaaggtaggtcccggcctccaggccctcggccagggcaacacagcctccctcctcccccagcccgtccggtgggggaggggcggggcgggacgagccgcgcgcggtccccagttgtcgcgggctggtgcggccggccggtcccgcgggcggcggcggcgggtgctcggggccgggcggggcggcggcggcggcggcgcggggacgcgcctgtc

SEQ ID NO: 49475 - DNA, 402 bp, Mus musculus
  source 1..402: mol_type = other DNA
ttagctagtggatattttttctttataaataccacacagttttaactcccacttaattcttttgagagttttccttctagacttgtagaagtggacattgaatcattgaatcattagtaacattttaatcctaaaattaaaggttagcatacaatattttctgttacttttgaataaggagtagggaaaaagtcactctaaagcagagaattattacatagagtctgcattctgaatacttaaagaacttctgagtattttacccaggtaaatctttcattttagagactgatcaaagttaaccatgttttagctaagctctttctctgtagtcagagtgaccctgccaaactccgcgcgtgcccgaggaggcggggccctgcccagcctgcttccagacac

SEQ ID NO: 49476 - DNA, 362 bp, Mus musculus
  source 1..362: mol_type = other DNA
acaatgttacagttatgaagtagcaatgaaattgattttatgtagatattcatgtccctggctacctatgtacaacctcagagattgactgtcataatgactactatggaaatttttttaaatattaatttggctgtttcaatttgggtaacacctttttaccatagaatcagttcattcaagttaaggtcgtccaaccttggctcattttctaagttacaaaatggtaccataattagttattttcatattactagtcttttagagacttcctaagtgtcagagtgtgcatgtgccaacctgcgccaatttgcgcactccgaggctcgccccctaaagctcgcgctaggaagtgggcgttc

SEQ ID NO: 49477 - DNA, 390 bp, Mus musculus
  source 1..390: mol_type = other DNA
ctggtatataataagaactataataatatataacatactataaggcatatagtataatgtaaggatgagcagtctttcagagacgtatccacacaggagttttgactgttcattcctgtaaagaaacattcaattagctccaaaagaggcattaaaatatactttatatgatgcggataataattattagctcatgattaccttggactggggtttcagaactctgggctcctgtgatcacagaaagactattctaactttctagattctaccacacctgacacagtattgaaagagtaaaatgtcagagactatttcaaaggctcacagtagactccctcagcgctctgagtggccgggcagtaacagcgtccactgccagggtcctgc

SEQ ID NO: 49478 - DNA, 528 bp, Mus musculus
  source 1..528: mol_type = other DNA
tggattattttccaatgaatagaaaatctgttaattaaatctgtcctgtcaaaggtttgttaagcaaactgcctaaagttgacacacgcaccttcagcaggtgtttccaaactgtcagtagctaactcccacagtaagaaatttactgatgaaccataagcaagcatctgcttcaaagaatcaaatgttgttttgtaactctgcctctgccttccgagtgctgaggttaaaggcgtgcaaaaaatttctcccagggcctcggtagcatgctttttgctgcctaatataagcacaggttggccgaaccaattaggccttactcaaggtcattaaaataatttttatttttgccgggcgcaaagaaaactttaactcgagttcaagttaaaccccaattagtgttgcgcaggcgcttttgcgcctgctggtggctggcaaggggtcagcgcgcctgcgccgccccttctgtgggtggggggcggctccggcgggttgcgcaggcgcacactgggcggccggaagagccgc

SEQ ID NO: 49479 - DNA, 401 bp, Mus musculus
  source 1..401: mol_type = other DNA
tcaagtgttggtgatgaatttgggtgtaattagtgctaggtcaagagcaccctgacgtcaggaagtcatcacagtaattaatgtttattctttctatcctgggcacagcatagttaggaataacagtcaagttaggagtaactgtaatatattgctatatttacattaccattaatgtcttactgtgtctaatttacatattaatattttgtagacatgtatgggaaatgcagagaagtatctggcaattaaagtaatcctggtggtgggtttcttgttacccagaagcgtacaagaacagaaatcatgttttctgactttgaacagaagattgccagtgcaacaactagtttctgtaattagacatgtctcataggtttgttatgagaaagaacaatcgc

SEQ ID NO: 49480 - DNA, 438 bp, Mus musculus
  source 1..438: mol_type = other DNA
gcacatttattgtaaatacaggcaaaatgaaatggctttcttttcagccattagagactgtgacaattctgcgggtccaagtgtggggggaaccggtcctctcagcctcccggcggggaggcgttcccggctcgtggagacccggggcatcccgagcagcgggctgctggccacgtccccacacttcctcccgcgcctctggggcccgtctggtccgggttgcattcccggcccggcgtgcagaaggccggcggtgggcgacgcccggccggctagcgctccgcccgccgcccgtgcgctcctgggtccccgcgcccgcgccgcgccgcgccgcgccggcgcctctgccggccgccgggggttatgaatgggcgcagcggaagccccgccccacccggacgtgacgcccggccaatggcagcgcgggctgcgtgtaag

SEQ ID NO: 49481 - DNA, 337 bp, Mus musculus
  source 1..337: mol_type = other DNA
acagggagtttctgtcttgtttgtatatatgtatgtatgcacgcatgtatgtagtgtatagtgtgatgccctgaaaatgtaatcttagcagcctcattaggatattgtctttggaagattttaaagccatcctacccagctgtttctcctggagggacatctcacaaccccaaatatttcttgtggagtaagtctctggcccagagggactgccaaaagcttttaaatgacagctaaggtctcaatcaagagttctctcaaagctcagtctgggagatgtagtcctcccaaatgctacaactcccatgccgcctcgcgcggagcaggagctggctgt

SEQ ID NO: 49482 - DNA, 268 bp, Mus musculus
  source 1..268: mol_type = other DNA
tatggcatcttggaatgggaattcaatttggaaacgtactcctacaaagaatttattcttctggttctccctagcttctgacaacccaggtaaatatgagttggacaaataaattctttaacgggcccaggacactttgcatgttaacgactacaaggagccagagcctggaggctgcccagcggctcccccatctcaccacaggtcacagctgccctgaggctagccgctggctcccagaggcagcgggacagctgctgccttgctt

SEQ ID NO: 49483 - DNA, 286 bp, Mus musculus
  source 1..286: mol_type = other DNA
ctcctggctgacttagttgcctatggcatcttggaatgggaattcaatttggaaacgtactcctacaaagaatttattcttctggttctccctagcttctgacaacccaggtaaatatgagttggacaaataaattctttaacgggcccaggacactttgcatgttaacgactacaaggagccagagcctggaggctgcccagcggctcccccatctcaccacaggtcacagctgccctgaggctagccgctggctcccagaggcagcgggacagctgctgccttg

SEQ ID NO: 49484 - DNA, 424 bp, Mus musculus
  source 1..424: mol_type = other DNA
tccatacagtctatataaaaatcatctgtcatttaagaaatataattggacacttttgttgtggagagagacaaatcatatctgttttttaattatatgcatttttaatagctttcattcttattaccagattgacttacagaaaaaaattcattcatttggagcttactctcagggtaatttatgctcgaaaagaggtatgtcatagaaattattaacaacatctgtgattgcaatcagttatttagtttagagataattttcaataaactgttgtcattggaaaagaaacagtctggacaatgtatggtccatttgggtaaacaaccaagggaatgcctccttgcttgcctttccttgttttagtttgtagcagaaggttttactttaaaaaaaaaataatgctgtttatttcgtgtgtctt

SEQ ID NO: 49485 - DNA, 438 bp, Mus musculus
  source 1..438: mol_type = other DNA
gctgacttcaaactcagggcaatccacactctgtgaagtaccgtggtctacatatgtgctgatctgtggaacttatctttagatgatctctgagaaatgtccctttgttcattccactttcagaacattgacagcaaaactgttttaataattgttaagtctttaaaagcagtagcaaagaatacctttctgaagctaacattttgtgtatgattattgacgtcaaaaaacaggcatcccattttccaggtgtgccttcctacccaactggggaaaggagcagcaagtgatctgaagatccaggagggctgcagagctggcgctgaggctggggcgcaccacacctgtgctggtgaccctgactgtcgctagggcggaggcgcgctcacctgtgcccacgtgacggggcgggcctctgtcggcagagggcccgtggcc

SEQ ID NO: 49486 - DNA, 300 bp, Mus musculus
  source 1..300: mol_type = other DNA
aagcaggaagcatcctctctcaggctcctgctccattcatggggcactgagtgaagcagttttacatctgatgtcatatggcagatgcttcaagacttttcctctactagaaaaaatttggccatttctaaagggtgacaaacttgcatggagctccacatttgtagctcgcaaccacccagaggaagagggtgtttcctgctggctcggggtcttggcctccgggctccacccagtccgccgggcgccacgccctaaggagagctgccttggggcccatcattttgcgtccctggctgc

SEQ ID NO: 49487 - DNA, 340 bp, Mus musculus
  source 1..340: mol_type = other DNA
gcttctaaatttggtgtggttgccaagttgcaaaattgccccgggacagtctcttcaaaggagatgacaggaagtattttgataaaagttactagtgtaaaatttaacaacatgaagggaaaataatgttatctctcgtgtgagttgcaattttggaagctcccattgtgtgaagctcccctgacaatgtatttatatagatacagggtcattagacagagatttgtttggtttataaattgtaccccccttgtttaaaaaaaaatcggataaagtacatttggtttctcttttgacaaaccatgtatttgagagggaagaaaaaggttgcaatttgcct

SEQ ID NO: 49488 - DNA, 429 bp, Mus musculus
  source 1..429: mol_type = other DNA
gctttaaagttccccagccttgccaagctgagctcacagccccctgcgactggctctggccaaaggggctcgctccctagtcacaggcatttgcaaagagcctggaacccggtccagctgagggcacgggaaggcagcccaaccccggacgcggctgctgccgaggcccctttgcaggctttgccccggctgcatgcacagtgcagccgcccgtgacccgggagccccaagccgtgaggggttgcctaccctaccggatcggcgtggcggctcatgctgcggcgtccgggtgcctcgctccagccagggcgctgcggacacagcctgggctgcgggccggggacctgggagctaagcccggcactgccggctccttccaaagcagatggagtcagggggcccccgctatccccgggggacagtgattcc

SEQ ID NO: 49489 - DNA, 330 bp, Mus musculus
  source 1..330: mol_type = other DNA
gattatcactgcacttcattcacctgcattttgagggaattgtaaaaaattaggtttaataaataaatgttcattgggaaaaacgaaataaagttatggctttattttcctaattggttttgtttagacgaaaagttcaaattaatttaaagtcagctaactctttccatgggacttctggcttggattacacatttggagtttaaaccacaaggtccaaatgggtgtcttgacagcaatggtttcgggaccattactaggtcctagtccctgctctcttaattttagaaatagttttgagacaaaggagtgcctccgcggccgcgccac

SEQ ID NO: 49490 - DNA, 377 bp, Mus musculus
  source 1..377: mol_type = other DNA
ggtgccagcactactgttttacaggaaggagtgagaaaccacccttgaatctgcaggggtctgccggcagcatccctttcatcttaaaacagtttcacgtcattgtaaactttggtcaagaaatgctgagttagccatgaggcaagctaccttccatctctcaaggctgcgccaccattggcaagcattctgctcgcttctgcatgacaggatcgacaggatcctcgtgcttggccccgtggggacccctcatgggggaaaccgtgcttctccccagcaaccggggacttgcacgctgtcagtgggctgcagaaggactcgcgagtccagatactttccgacttcctcgggacacgccccgtcccgccccggaagtc

SEQ ID NO: 49491 - DNA, 273 bp, Mus musculus
  source 1..273: mol_type = other DNA
tgtggctgtcttcagacacaccagaagagggtatcaaatcccattacagatggttgtgagccatgagtcagtgctcttaacagctgatccaaactcatgatcatcttctgaagttctgggaacataagtgtgtcgctaagttgttttaaaaacaagaataaaacatctttaatgcagcagatgtggacaagtgatagctacaactttttattctctacaactctagtatggaaaatggagaaaaaaactcagggctcagagctccgccccgaa

SEQ ID NO: 49492 - DNA, 278 bp, Mus musculus
  source 1..278: mol_type = other DNA
tcctccaggccctctggacacatcttaccagaggggctgtgtcggcccttggggtacagatgaggaaatagctcagagtaaattaatttcacccaccggtgcaggtaaaagttagtgttactctttgtcccaggctctacactagccaagtcaagggcaaggccaggattctgtcaggttcaaagtctgtgtttgtaaaagaaacaattttacgtcatctccattacaaaatactcttgatgaaggaaaacaggtttttaattccccagttgagattt

SEQ ID NO: 49493 - DNA, 241 bp, Mus musculus
  source 1..241: mol_type = other DNA
ctctcagaagggccatgagagtacctctcactgaccagaacaggacttctcaaagggcgtggcccgtgggagatctgctggtccaacagcataaaactgtctttgttggtccctaggacttgaagggacccaggggctcctcactgccacgcgcacctgggtcggctggggctcctctgcaactcgagcggggctagagaggaggagggaaagtgggggtctgtctccccacttcccgccc

SEQ ID NO: 49494 - DNA, 262 bp, Mus musculus
  source 1..262: mol_type = other DNA
caaaagaagtatatacgaactatatacatttcttcctaaaaatgtctgctatgcagctaaaatcttttaaagctggatgtttccttcatagaatgtaaaactcagatctgcagaacctatgtaggaacgccaagggacttctttctgcaagcatggatcgctccaggtgacccctttcctgccttcccgccaattattgtgggaaattattccgctaccggcggggacccgagtgcccgccggacccgtggtgctggttccc

SEQ ID NO: 49495 - DNA, 308 bp, Mus musculus
  source 1..308: mol_type = other DNA
ccagaattcttaaaagttattctcaaatctttaatatatattgtggacttcttagaaaaatgagtattttgtgtggtacactaaaatagaattctaactgaattcgtcaaacaggtcttcattctttataaacagtcttaagcagcgcaggcttgacttcaagctcactaagtgctaaacaaaaataaacatcttttagtggtttttatcgccagcgtactgagcacactatcctgacgacctggggcgccctagagaagctggacgcacccgccccgccggggaaccagcaccacgggtccggcggg

SEQ ID NO: 49496 - DNA, 158 bp, Mus musculus
  source 1..158: mol_type = other DNA
ttcttagcttttaaagaagacatttcctatatggaatcttgagttagacactgtgtcctgtcatgaggcttcaggctgaactgaggcacccggcggagtgtgacgctgcagtggcgaacaggtgagcggctggggctccgggtccccgcccttgcctc

SEQ ID NO: 49497 - DNA, 501 bp, Mus musculus
  source 1..501: mol_type = other DNA
atatgtaaccgattagtgattagcatcaaatttgaataaatacgatatacagtcagctgctactagacagcaagttagcttgccgtactctctgttgtgatgtaacttcacagcactgagggattcaacgtggagattcatttctattacaaatacttttgaatctgagaatgaatgaatactaggaagttgtgtattattaactatctgcatcttgcatgatatgcagtccacaaattaatgtattgagagactaacacatgtcttctagaagctgtgaggatagggacagagctcctgggagctcacccattgccatgagttaccataacttgtctgtaatcatgttcttggtcacagaaacttgcatagagtaagtatgaacttgctacatatagctttgcagtttatcgtgtaacattttaacctaaagagtaaactactgtaatttcctctttagcggctggaattagtgtgacagggctgttaaaaggctttgta

SEQ ID NO: 49498 - DNA, 385 bp, Mus musculus
  source 1..385: mol_type = other DNA
ttcgtcattgaaattttaaaatggtattttgaaaacattaagtaaagtttattgctatcatcattattataaacttccaatcgagaatcttttgtatgttttcatgtctgagaatcatgagaaaaaaagaaatttaaaaattttcctcatttcagtgtccagcccacccacagcgaaaactgcggggggggggggggaatggcaaactagtcgctctttttagcgtcgagagaaccgtttggccttaaaatcatttatatgcgcagagcagggctgcccgctccgcggtcactgcctgaggagaggtatcaggcggtggtcagcacgttaacaatcaagttaattgaattcattggagtttagaagccagagagggctttgaatg

SEQ ID NO: 49499 - DNA, 680 bp, Mus musculus
  source 1..680: mol_type = other DNA
tagactagatctctgacctttatcataaagtatcagcagatgtgacacatatggagacagagaatatcattatacttttgttgttctaaaataagcaaatccatgggaatgtgaatgtttcactcattatcaaagttaatttagttgaatatgttgaagatcactaaattggaacttagatcattaactggcttgagtaaattattgtgtaatgaattgtatgattgacttgtatcctaagtagatacgtactggatttataatttctaaagattcagtgttctataggagctataggagaattattatttcatgcaccaatgactggtcaggtacccatgcacatatggttagcagtagctgaccttagtaggttattttaaaagtcataaagttgacacaatgatctataaatatcatactttagtgtatgcctgatagaaatatttataatagagaaaaatgaagtcatttttaggtaaaaattatggattaccaaaggtaaaatttctctaaaacctttaatttattcaggtagaaatgtcaatgcatttaaacatcagcacttcttattttaatgtagtgttcagtttaaaaccaaaaactacaaataactctaaagtccacttcagttacttagttccaatgaacagtggactggggtaaattagtaattggta

SEQ ID NO: 49500 - DNA, 504 bp, Mus musculus
  source 1..504: mol_type = other DNA
ctgaaagagtcagatgcagatatttgtacctaaccaatggacagaagcagctgactgatcctgcaagagaaccctcaagagactggaggcctcaggaagtttaaataataaattaaaaatggaaaataattttcaaatacagactttacaaaacattgtaccaactgtttgatttgatgtctctgccatgctagcattatggttattatcacaattctagaaactatttatagagaccattctattaagctcagaagtttatttaattctaattcatactggtatctgctactaagtaaaagaataaaagattacctggtgctttatataaagaacatgttgtagaagtgtaaggtgtacatgtgcatgcatgtatgcatctgtgcatgtgtgcatgcatgtgtatgtgcatgcatgtttgtgtgtgcacacctacacatctgtgcagttgcaagtgtgtgtgcatgtacatgaacacatgtgtgaatatgtgtgtgtgtgtgt

SEQ ID NO: 49501 - DNA, 403 bp, Mus musculus
  source 1..403: mol_type = other DNA
gggctcgtttggagacccctctcgccgggaacgcggctgtcccagctccgaaaagtttgaagatctttaaccacttcaagtggttatgtaagaaaaaaaaaaagaaagaaaaaagttttaaagtatgttgttattttcttttgcccagagcccagggcgcgtgacgaccccacccgcgttctgcccccacgcactgcagaaggacctggagtctggggtgttgctggcgccgggcaagccctagcgccctgcggtctcacggtccgccactccacgtggtgaggatcaacagtttgttgagctcatcagtgacaccttgaacttttccggcagcgcgccgggtcgtgctcaaatgacattttgccgaacggaacccgagcccgggtggcagctccggtggtgg

SEQ ID NO: 49502 - DNA, 272 bp, Mus musculus
  source 1..272: mol_type = other DNA
cacggccatcctaggctgtgctggggagggcaaggccaccctgcccctttaagtgtatgatatgaagcaacgtgtctgtatgtgcctcacaggcaggtgtctccacacaacccatcagttaggtgtcttgcctctgcacagataaaaaagcaacttgctgcttattctgcacagcccactctgcacttctgaagagcctaggctctgagaccccacactttcttcccagagaaaagaagagaacattgttctaacccactgccagcctgcca

SEQ ID NO: 49503 - DNA, 385 bp, Mus musculus
  source 1..385: mol_type = other DNA
taatgatgattctttgattgcagtaagttcagatacttagtttactactctttacggaaagttttactgatcctaaaccatattttcaaaaaaaaaagttctagtgaaatcggtatctttccaccatttgtttaaaacaacgttcaggtaccgctaccgtgctcacagccgcagctgcatccccagtgtctaaataaatactcttcaagaggcactactccgttacaactccggggagaactagggatgtagtaactggccccaccccaggacgtcgagtcccggtactgagctgcaaaaacggcactggccctttaagccgccgggacacttctggtcacgtggaccgcggccaccggaaggggaagtcgaattcggtggcgcc

SEQ ID NO: 49504 - DNA, 377 bp, Mus musculus
  source 1..377: mol_type = other DNA
gaccaggctagcctgacctcataagatctgatttcattagaaatcgacttgcaacttcatacatcactgaagtggagttaaaagtattatctaaattgcttctcgaaacactgagtgaattttgctaagtgaaaaaccaaacaaagcggaattcatttaggtctgtggagttatttctataaatctcttattctaaacgcaatagagaaaggtgtcagagaattgaagtcccagacttggttttcagaaaactacaactccctgaagccttggcggatccccgtcctgattggttgtaactagaaggggcgtcccccgcgtgattggcacagtccttgggggcggagaccccgcggcggccgctcgaatttcccggg

SEQ ID NO: 49505 - DNA, 165 bp, Mus musculus
  source 1..165: mol_type = other DNA
tcccacagcttcccaggcacactgcccagacctaggaactctgtgcagactgggagcacaaaggggacctgtgcccagtcctccttgaaagccggctcagcctgaggctgaagcggaagggtggttctcggagcagtatgggaagcccatagcttcctaggaata

SEQ ID NO: 49506 - DNA, 433 bp, Mus musculus
  source 1..433: mol_type = other DNA
ggtgatattaggaacttttcttataattctctataatatctgaatttttcttaataagaagtattgcatttctgatgagaaaacaaggatcccacagtagctactgcctggaggctccctgcgtggactccacatttggtgagccaagaaaagctttattacataacacaagccagtgttttgtccacctttacattctagagtcaaaacgtttcttgaaagtctcaaaattctgctagccttgatccaagtctttctggtctcttcttcagagaccctgggcttttgaacaagttacctgacttcttcaagcccagtatctccttttacaagataagaataaccgggctcttctcacagttattgggaaagaaattttagaaataaaatgcaaatgagaatttgccgacaacccaccgcttccgtgtgggcg

SEQ ID NO: 49507 - DNA, 590 bp, Mus musculus
  source 1..590: mol_type = other DNA
ttctcttacgtccgattcgccctcgtttgttatattcaatggaacaatgacggctgaggtcctcggctggccgcgctgcggggctggtgcccactgcggagagctcggcttcagtcagtgaggctccaagtggggccacacttaacttctcctgctggactcgggctaggaagagcagcggctgacaggagcgcgggactgttgacaggggccttaggacgccggcccgaggtcgcgggaggcggggtccgacttctgacgaccgctggccgagcaatcgcttgaacggggcggagcctcgcaggccctggaggaggagcttctcgcgacggggcgtggcttgacagaggcgtggccccctcctgacagggggcgtgactctccctgacagagggcggggcggcgcacacctcccgcagcgcccggttctagaggagcggcctgggtcgcatcccagaggagcggcggagtcctcgagtggggtgcccggctcgtccccgcctcggctggctgcctggcctctcggcgcttctgccgggctgcagagctccgtggggggccccctcgcgcgagggccctccgagtggttc

SEQ ID NO: 49508 - DNA, 413 bp, Mus musculus
  source 1..413: mol_type = other DNA
gccaagcctgtttgagagccatcatataatctattatgtatacccctaattaaaaaaaaaatgttgcatttaattactttttttacgcttaaccttgacaaaatagacacagcaaaatgtctctgtaaatgaattacatttgtaaaggtgactggccattaactttatgtcgtaattactttacaagttagaaggagcagtttatttttgttagttcatcaataaaaacctcttcggcgggaagccgccggcagggagccaaagggcccttccgcctctctctccgtctccttccactgagggcggagagccgctcgacgcggttcgctggcgcctcggttcgcgtcggctccggttcccgcggccggcggcggagggattcggcgcgcgtacgctgcggccgctgggcgcgc

SEQ ID NO: 49509 - DNA, 447 bp, Mus musculus
  source 1..447: mol_type = other DNA
gcatacacaagttttagaattttaggatgcaactaaatttcatgtaaatgcagagtgcaaagttctcttacgtccgtattcgccctcgtttgttatattcaatggaacaatgacggctgaggtcctcggctggccgcgctgcggggctggtgcccactgcggagagctcggcttcagtcagtgaggctccaagtggggccacacttaacttctcctgctggactcgggctaggaagagcagcggctgacaggagcgcgggactgttgacaggggccttaggacgccggcccgaggtcgcgggaggcggggtccgacttctgacgaccgctggccgagcaatcgcttgaacggggcggagcctcgcaggccctggaggaggagcttctcgcgacggggcgtggcttgacagaggcgtggccccctcctgacagggggcgtgactctcc

SEQ ID NO: 49510 - DNA, 360 bp, Mus musculus
  source 1..360: mol_type = other DNA
ttcctgtggttctccttcctgactccacgaccctggaggctttgttctgagccaggcgcctcgacgccagcgctgcttgcccagagtccctcagagtgggacccaagggtagtcgagcttgacagcaaaaggcggaaggagtgggggtagtccctccccgcccctacggtcccgcagcttccagaccctctgggactgacagttcccttgtccgggacccgtagaggggacctagtgccgagtgcaagaccaggatcttggtggtgccagggcaccgaggggaagccacgtggcctcggggcgcgggggggggggagcaggcggctcttccggcggggcagcggcccgggataaatactg

SEQ ID NO: 49511 - DNA, 348 bp, Mus musculus
  source 1..348: mol_type = other DNA
tctgaagactgggatgtctatagagacagttctctatgtctttaattcactatgcataaacactgttttagcaatttggtgtcttctcttttgaaaataaatatgattaacacaaaatgctatccagactctttaaatctttttttttttaaaagaaaaattcttttgtagtctaggatcaccttgcattagaagcaatcctcctgcttcagtctcctgcataaattacaatatggtgagatcttttcacaactggcgagagggaagcctctaagtgcatcccgctctagttcagagcaggcttcgtcatcccgggctccgccctcacgctgcacggggccccgccca

SEQ ID NO: 49512 - DNA, 320 bp, Mus musculus
  source 1..320: mol_type = other DNA
ctcacttctgtctggtgagaggagacactgattagagtcaggactttcacaagactatacagattactaaaaatatttaagcaagcaagcaagcaagcaagcaagcaagcaagcaagcaagcaaaaagagcctttcctctgggctcctttgccttgatagcctaaaagggaaacttgaagagcacccagggctctgaggtcacagcaacctactcttagagaacgcgttcctctctttctatttataccgatgcatgtgggcatgcgcagccctgcaggccctcgggtggcttgtcataacattggaaagtatatgcggc

SEQ ID NO: 49513 - DNA, 379 bp, Mus musculus
  source 1..379: mol_type = other DNA
catgtatcataaaaaattatctataacaaaataagaatagtgatataaataaatgatgatgaccattgtgtagaccaaactgtcttcaaagtcacacagatctggagtgtactttcagcaatgcttttgcatctgcaggtaagagctgactctccatgacgaaatgattaagaccaattaattaagaaaatgattgagagctgaaacaggaggctttcttccagttcaagatggggaaaaggcaaaataatcttttcaaattctttcaactattagaagcaagtggccctttagttgtgataaattaattcaactttaaagagtctaacggtctctcggatggcctgcccgtccagcgtgccaaaatccattataaact

SEQ ID NO: 49514 - DNA, 387 bp, Mus musculus
  source 1..387: mol_type = other DNA
ttgaagtgtgtaccataatagtttcaaataattagatataatggcatgtcagttcttatcagtagtgtataacaaaacatgacttaaaaacattgctttaaagtttgcttaggaaataaaatatctgcacctcaaatccctacattttaagaatttggatcttggaaggagtccaacgttctccatccccaggatacagcgaatgccttgggaaactgagtcacacaaacccagggagcctctgtcaccccaatgcgcaggcgcggctggctgggctcggagggtctctgagtcccgccttcctcgcaccgttcaaccacgtgcggggggtggggtgggggcggagctccacgctcggacctaggccagtgagcggaagtgacgtcg

SEQ ID NO: 49515 - DNA, 596 bp, Mus musculus
  source 1..596: mol_type = other DNA
cttccttacaaagaagagaccctggccttgcaaatatctaggatctgggcaagagggatgagtctctcctccgagaccattcgataaaggtttatgacattctcgtcgggtcagggaagagtattctcctccccaacgggttgagccggccctgccgccttccccagggtgctgccagagagggcgtttcagcgccgcactgtctggcctcggtgggcaccgcaggcctgggctgggtgcggtgacctccgaactccagatttaggacggtgcttcggagagcagtgcgggagctgcaccaccccgccgggcatccggatgccgtctgacggggtaagcaccccttcctttccttgccacgcaaaggagtgggtggagactccaggatgagctccctcccaagcggctatgcgcctgcgtggccccgcccagtccccgcccagtccctgccgccccgccctcctatcccgggctccgccgctaggggtggcggctgcggctcgggcctgcggttgctttgagggcgcagcagccctaccgagtgaggccggcggtcggcggcggagggcggcgccggaggagggcggcgcgcggtg

SEQ ID NO: 49516 - DNA, 447 bp, Mus musculus
  source 1..447: mol_type = other DNA
tgatagaaaagtctcacatttaaatgtactacggctatagctcatgaatattcatttcactgtttacatttacagacctataagtcaatacgcctcagagctcacatggtggaaaaagaggagagacactgcaagttgtgtgttttacaaaagacaagagattcagcaattatgagattttgatgattttgcacaaagacatgtttccctccttggataacaaggcagccgtgatgttgcaagaaaagggaataaggaagctttataacatttcatttccaaaggtggctggtgctaatttataagcaacactagagttttggctttctgtaaattcaatccactgcaaattcactttttaaaaaaattacgaggagagttcatttcatgagttttagttcatagaattactaagtttcctaagtacagcagtaatacttcgagatc

SEQ ID NO: 49517 - DNA, 670 bp, Mus musculus
  source 1..670: mol_type = other DNA
tctgattaaggatttatccaggacaaggataaatcaaagacctcagagagttctgggttcttgcccgtccacgggcaaggcctgttcccctgccattcctcaggcctggcctctgggtggggagaggcaggtaggcagggcggcgtcctccagcttttcactggctctactcccacgctcggggcacgccaacaccgaggggcagccactcacaggcgctcgggcgctgggacgcggcgggccggcgacgcgagcgccaccccgcggcgaggcgaggcgaggctaggcgagccgaagcgggcggggaccatggcaacgctcgaggctcgccgggccccgcgtgctgacgctgcgcggcgcgccggattgtgacgcagggccgcggcgccggctccgcgttctcgagtgaccgcgggcgccgcctcgggggcctcgcaacggcagcaacggccgaggcaggcggggtggctccgctggcgggggaccggccggaaacaccgacgccccgaggcctcccggcagccgctgccgccgccccctgctccaccgagggacgcgagcgggcggcggggcgggccgggccgggacacaggacaggaggcggccgggggcggagccactttcgtcggcgcccgccccggccgcggccccgggcctcccccgcgccgcc

SEQ ID NO: 49518 - DNA, 499 bp, Mus musculus
  source 1..499: mol_type = other DNA
tagtataataaaactgtatgtatatactgctagtataataaaactgtatgtatatatcccagcagaccgatgctagtataataaaactgtatgtatatatcccagcagaccgatgctagtataataaaactgtatgtatatactgctagtataataaaactgtatgtatatatcccagcagaccgatgctagtataataaaactgtatgtatatacccctaggtccattcgtttgatggcacgaaggaagcagcagctgctttggtttttatattatcagattctttaagttttaagactttatttattacagtttaattgatctttgggaattttagtaactacttatgaataaattggatagtagatggttttcagtcattacatattatttcacagatatgcgttcacagcattgtataagagagtctggctcaatgatcactggtgaccatattgttggcattgctatcgaacccaggattattctaagtaacag

SEQ ID NO: 49519 - DNA, 386 bp, Mus musculus
  source 1..386: mol_type = other DNA
tcagcattgtacactgcaccaaacttgtatcctaggattccagggttaccctctgcctagcctcaaactcataatgtaatggagagcttatctgtaaaatcaggctaaaataatcactaatatctgagttactctgcaaactaaagataaggactgcatcgggacccgggttcaagggcgggctcccttcactgtcccttgatcagcctggcccacggggcccctcggcttccgtccccgagccccgggtccgactcgaggtggcgcagcgcgcgcttatacagccgcagcaccttctgctggtacgccatagcgtccggctcaccttcagcggccgccgcgggggctgccgggaacccggaagcgggcggttgtcggaaccggaa

SEQ ID NO: 49520 - DNA, 301 bp, Mus musculus
  source 1..301: mol_type = other DNA
tctttctggcactcaaagatttgctgaaaagccttcattggaacgccactcccaatagaagtgaaatttaattgggtctctccagctgtcggatggatcgtggaacttgcgaggcgacacagcaggacttggccacattccggactgtcaggccgctctttccagttgaattaaacacacattgcccgggaatgctcaaacgcgaggcctccgggcatcttccgtgccctggaaaggccatgccgcgaaagaaaagcggaagtggctcagagcacgctcgtccttccggttccgacaaccg

SEQ ID NO: 49521 - DNA, 380 bp, Mus musculus
  source 1..380: mol_type = other DNA
agctggggccactggcacaagtagtgtctgccagtcaaccttccagcactgatgggggggtggggtgggggactcacaagccactaccctagctactgacagttgatggtgaccactgcttgtttgtatgacatgctcaaagaataagtcacatttttcgccttgcatcccagagaggctggaggatctctgagtctgaggccagcctaggttggaggtcagcgaactctggaaggggctccgtggacccgccctgcagtggatatccgctcagttcctcctcagcgcaggagaaagagtccaactgtgactcagcaatggatcctcagtgctgccgccgtcgcctttagcagcatctgcgctgctgggaggaaggacaa

SEQ ID NO: 49522 - DNA, 584 bp, Mus musculus
  source 1..584: mol_type = other DNA
ttttgatcagtgttgaaagaatgacttactaaactgagttacctcagtctttggtgccctttttaaaaacttctcaagggggttttctgtggctatggcaaccctggctggaaaaccatgcagccaacgatctgtacagacagatgggcaagtgagatgccctttcgttcgccgggcgttgcagtcctgacatcatcgaagaggcctcttctccagaggctgcagcagcgacagcagtaacagctttcccgcctcactggtcgctcaccaggtgcggggcgcagcgctcaacgtgccgaccttgcaggtccctcgaggggcggggccggaggtgcagcgcggcttccctgcacgctagctgccattgtgggcggctgggcgctcactcgcagagaccctcgccgcacgaggcgctctgaacgtccgggagacgcacaccgggccttgcagcaggcgctctgcacgcctctcagccagcgcgcgctcccagccccgccctcgggcggctcacgcacgagccgcgggcgcgcgcctcccccgcgctcccgcgccagacggtcgcgagcgcgcgtgcgctcctcgca

SEQ ID NO: 49523 - DNA, 481 bp, Mus musculus
  source 1..481: mol_type = other DNA
atatctgagaagtgtttagggtgagacctaaaccatagataactaagattacttctgtaacagaaaggtaatgccattcttgcaagactgctgtaagggttgaatgaatgtttgcaacgctctatagtgcttaaaacataaaatgatcttattaaacagttttgggatttgactggtctggaacacgctatgccttgcatcccgagttctggatgactcctgtacaccaggtccagagcgagctccaccctccgcaggtggggcctgaggaccccgcggcggccaggccgagcgggcaccgccccattcaccccggccctagcgcctctgcgactggcgccgcgcggagtgcgccgcccgccattggacacgctagcctaccgcgcggtgcgcgctctcattggttcggacggcgtgggaggcggggtccgctcaaggggcggtgccgggccggagccccgcctcccggtccctgggctgg

SEQ ID NO: 49524 - DNA, 481 bp, Mus musculus
  source 1..481: mol_type = other DNA
tttaatacatgttgtggtgaccccaaccataaaatcattttcattgatacttagtaactataattttgctactgttaagaatcataatgtaaacgtttatggaaacaggtttgctaaagtatatagaaatcaagagtccaacttttcttttctttttttatgaacttttaaatttcctatcatagaggcgtgggtgaacatcaggcgtgcaaccccaaccctgcaagccctaggttttcccgttggctccggggacagtaccggacgtggcccacgggggacaggcccgcctccgactcacctgtcagccgtccgacgctggccgcgtggactgggcgccccggtccccgtctcccaccccagggatccccctagagtcccgggccgcagagcgtcagctgccgggacccgggtttctgtcctggagtccctagcccgtcacgtgaccaaggggcggcggcccgggcccgggcatcatgtg

SEQ ID NO: 49525 - DNA, 313 bp, Mus musculus
  source 1..313: mol_type = other DNA
caagttattgggctcagcacactattttgcttcccttatattcatgaaagagttgctgtcaagttaagccagttttaaatagggtgtctccgttttcagcatgcatacacccttcacctgcagaagtgaaatggcacctgtggccttgtttcaaaagtcagttctaaacagtttgttttgttttgatcacataacctgtgatcatatgtgagcataggctcaggccccacctagctcggtgatatctggctgaaacgacccgcgcgcgctctgcgtcatcacttggcgcccgcgagcgatcacatgatgcccg

SEQ ID NO: 49526 - DNA, 595 bp, Mus musculus
  source 1..595: mol_type = other DNA
ccgtgcaatccgggcgggcggcaggcgcggggcttttatttcatccaacagaaggttctatttgtggaagcgacttccccggaactaccgcgtgggggtgaatgactgataatggaattcatcacctcgcccttcctccggctgcagccgcgactcgacggcgcccacagctccaccgggagctccccaaagtgcagaacggcggggaggggggaccactgggtctcagccagctgccggtgcgcagccaggaggtgcgcgcgcggccgccgggagctcggtgctccattgatgcgcgcgcaccaatcagcgacttccccgggaacctgacgtcacgggagctttgcctccgccccctccctgggctacgggcccgcgggcctgcggtggggcgcgcgcagcctgctgcccagcccaacccggggggcgtgtgcgcgcgcccaaggcgtcccaggacgttcccacctgcgcctcggcgcgcgcggtcaggagcatccccaggtccgctccggtgactgcaagccgggcgacggggccggagtcgtcgcagccaactgtttacacagcccgggctgtgagtgtgtgtgtgtataca

SEQ ID NO: 49527 - DNA, 405 bp, Mus musculus
  source 1..405: mol_type = other DNA
tgctttggatagtcctattaatggacctcagtgagagaggaagcgcctagcctcacagagacttaggagaatacccaggggtacctccaccctttcagaggagaagggagggaggtctaaaattaatactaaaaattaattaattaattttaaaaattaattaattaattttaaaaaggactactgaagatgtctctcttagtgcttgctgaacatacatagtcctggatccatcttcagcaccacgtaaatgtgacacagtagcacgtatctgttcctaattcacaatataaagcaagcttgagggcaaccttatgtcaaaaaattgttttttattaaatgtttgaaaatgttttttctcctctatataatccctatgaaatatttattaattgtattaggcta

SEQ ID NO: 49528 - DNA, 131 bp, Mus musculus
  source 1..131: mol_type = other DNA
tactttatggggtggcacaagccaccccatcttggagtctaagccaaagactccgcttagagccagcttccgcgggggaagccactttaccccacctgggaaactgcagcaaacagcttccttttgtagct

SEQ ID NO: 49529 - DNA, 348 bp, Mus musculus
  source 1..348: mol_type = other DNA
aagaaagtgtcctcttgaggaggttaataaccgtcacttccctcaggaggaaggaaatatatctgctaatttgtttttaatttaaggacaattactttctctcacaactagaaaagaaatacagttagggatttgaggagctagtcaactaagtcctgtattatattcctctttctgaattattattattattattatttactatccaaaattattacttgctctggaaacaggttttagttataaaaacgttctgataagaaaagtctgtctctctttctttagatactccatctaagaagaaatggaaggagaacacggtcctggaagggcggagcagccctagtg

SEQ ID NO: 49530 - DNA, 444 bp, Mus musculus
  source 1..444: mol_type = other DNA
gaaaaaaagttcactattttctttctgttggggtcctcatgaaataaggacatatatttataaaagtatgagctgtttcctacttgataattctagagaaggtttcaatcaagccaatgctgagattcagctggcccttagatatcatcatttggcaatgccagccttcttgccattgtcctcacactgtcagttccttatggaagaggctttgctgtgggtccactgacaagtattaggccttgcaggagaagtctggaaccttacaaagtgacaaaggaggattcgtccccatgggtcagtgacagttctggcacgtgttcacacctggctctagtcaggacaggataagaggattttactgttattatcagtttgtcttgataattacgcattattattgattagcattattgctggcccctaccttccaggaagggcaaa

SEQ ID NO: 49531 - DNA, 337 bp, Mus musculus
  source 1..337: mol_type = other DNA
ggtgtagaccggcagagactcctcccggaggagccgggtagagcgcacccgccgcctccacaccacccgccgggtggaagtccgaaccggaggatgccttccgagatggagtggctgttgagcaattttcgcctggccgcccgggacgtgcgtgacgcggtccgccgagcgctgcgcgagcaaaaatggtcgggcgcgcagtaccccggagccggagtactgggctgcggggctgaggctcctcctcctccccctcccgagttcccaaagcagagggcggggaagggagaaagagagattctctggctaatccccgcccacccgccctttatattcc

SEQ ID NO: 49532 - DNA, 349 bp, Mus musculus
  source 1..349: mol_type = other DNA
cacaccacccgccgggtggaagtccgaaccggaggatgccttccgagatggagtggctgttgagcaattttcgcctggccgcccgggacgtgcgtgacgcggtccgccgagcgctgcgcgagcaaaaatggtcgggcgcgcagtaccccggagccggagtactgggctgcggggctgaggctcctcctcctccccctcccgagttcccaaagcagagggcggggaagggagaaagagagattctctggctaatccccgcccacccgccctttatattccgggggtctgcgcggccgaggacccctgggctgcgctgctctcagctgccgggtccgactcgaagggcagg

SEQ ID NO: 49533 - DNA, 264 bp, Mus musculus
  source 1..264: mol_type = other DNA
cacctgttcggtgctggattaaagaatatcgtggtaaccatctcagatgagagttctgaaagctagttgacctcgcctgggcatagccccaggctgtgtgggacctatgtaggacctaggtttgacctcccaggacttcattgcctagggcagcaggccagacaccaggagatcggggacacacgcggcctgcccggtggcgcgcgcttctccccctcccccgcggccgggagcgagccgccgtgacgtcacgggccacccgcc

SEQ ID NO: 49534 - DNA, 204 bp, Mus musculus
  source 1..204: mol_type = other DNA
tctacatagaggtaattctggatttatgcacttgatcaagagcccatttcatcagcgcagatttggggccgctgatgtgaaggtgatctcctaaaactccctgtgtcaggaaacatgaagctacatgtgcctatgtgtagacacatcatggattttcttactagttttgagctctccagaacgttctagaagcttaaggagaga

SEQ ID NO: 49535 - DNA, 368 bp, Mus musculus
  source 1..368: mol_type = other DNA
gctgaactatctcttccttccagctgtaaatgcaaaagctttgggagccactggcaagaacttcctaggcctggatctccatctataaaggaaggcaagcggtgccctgcttctccttctcgaggcgatgaggcttctaagcgcttccctcatccatagctggggttggcggtgatctttttgttgcattacaaaatgtaaatattaggaactacctggtcaagctcctcctgctcagacaggttagagacttgcctggattatcccgcaaggccttaaggctgcattcaagaaagcaccagctcctggttatgtggggaagagggaggaatcccttctccctccccccacccctccgaggccgggag

SEQ ID NO: 49536 - DNA, 234 bp, Mus musculus
  source 1..234: mol_type = other DNA
cctagcaatcacaatcagctattggcctaataggccatcacttgaaagagaggccaattggacttgcaaactttatatgccccagtacaggtggaaatgtaaatgagctaaatacctcctttgcccacccaccaacccccactcagtaggatgggggaaggctgaagcagctttgccttgcttgaatcctgcggttcaagaaggcttgtagggagtcccacgtggccagagacg

SEQ ID NO: 49537 - DNA, 278 bp, Mus musculus
  source 1..278: mol_type = other DNA
ctgcagacagcatgcaccttagatatttaagagttttcctgtaaatggaaaatgaaaggttcaaggtgaaactttatatttcaggtgtggctcgtctttgacaaactacagaagcagtttgtaattctgtgaacatagattagcactttaaaaggtatgagggtcctcacccaccaacccccactcacagtaggattgacccataccatgtgtatcagctgaagcagctttgccttgctctgaatcctgcggttcaagaaggcttgtagggagtccca

SEQ ID NO: 49538 - DNA, 321 bp, Mus musculus
  source 1..321: mol_type = other DNA
ccaagtctatattgatatgttaaatagtcatttaagacttacaacttctatccaaatttttaatttcccacatctggtgaaacttttctttatgtaaccaggtcctgagtactggtattaaaggagacacaggacgcacttgtgatggccatggccaggtgtcgacttgactatatctggaatgaactacaatccggaaatggaagccacacctgggctccagatcttgaggctggaagacacaggctttacatccagactgagaggcacagtgactaggttatccacacctttaatctgggccacaccttctgcgggagg

SEQ ID NO: 49539 - DNA, 300 bp, Mus musculus
  source 1..300: mol_type = other DNA
ccaagtctatattgatatgttaaatagtcatttaagacttacaacttctatccaaatttttaatttcccacatctggtgaaacttttctttatcctgagtactggtattaaaggagacacaggatgtgatggccatggccaggtgtcgacttgactatatctggaatgaactacaatccggaaatggaagccacacctgggctccagatcttgaggctgcaagacacaggctttacatccagactgcacagtgactaggttatccacacctttaatctgggccacaccttctgcgggagg

SEQ ID NO: 49540 - DNA, 274 bp, Mus musculus
  source 1..274: mol_type = other DNA
ctgcagacagcatgcaccttagatatttaagagttttcctgtaaacggaaaaccttctgaaagggttcaaggtgaaactttatatttcaggtgtggctcgtctttgacaaactacagaagcagtttgtaattctgtgaacatagattagcactttaaaaggtatgagggtccttttcacccaccaacccccactcacagtaggattgagctgaagcagctttgccttgcttgaatcctgcggttcaagaaggcttgtagggagtcccacgtggc

SEQ ID NO: 49541 - DNA, 253 bp, Mus musculus
  source 1..253: mol_type = other DNA
ctgcagacagcatgcaccttagatatttaagagttttcctgtaaacggaaaatcttctgaaaggaaggtgaaactttatatttcaggtgtggctcccgtctttgacaaactacagaagcagtttgtaattctgtgaacatagattagcactttaaaaatatgagggtcctgttaatgccttcgcccacccaccaacccccactcacagtaggattgtgaagcagctttgccttgagggagtcccacgtggcca

SEQ ID NO: 49542 - DNA, 344 bp, Mus musculus
  source 1..344: mol_type = other DNA
cttataaaatgaagccaagtctatattgatatgttaaatagtcatttaagacttacaacttctatccaaatttttaatttcccacatctggtgaaacttttctttatgtgaccaggtctgtctcctgagtactggtattaaaggagacacaggaacacttgtgatgccatggccagttgtcgactatatctggaatgaactacaatctggaaatggaaggcacacctgggctccagatcttgaggctggaggacacaggctttacagaaactgaggcaaggacatttttgagtttgaggttatccacacctttaatctgggccacaccttctgtgggaggccta

SEQ ID NO: 49543 - DNA, 532 bp, Mus musculus
  source 1..532: mol_type = other DNA
aaagtccatactttcatgggatttttcagttggggtcttaacccccaaaatgctcaaaaccttactttcatcttagtgctgtgctcagaaaactaaatatagttatgttcgaatgaactagtagataaagtaattaagtggtgtagctctacatcacatcagatctgatctgcgatagcatcgcaggcgataacggagcttctccctaggccctggggagcctgcctagtgccagagctgcctctggaagcgcgcgcgagaggcccgaggggaaaggcttgctgccaggagccagacctctccaggtgcgggatgctcgcctcccgcgaaggtgctgcccctttaagggagggcgtggtctcgtatggcgtggccgcgccccccggctttccttggggcgcgccggaccacctgtctccggccgcgccccgcccctttcccgaggggtgggagaagagggcggggaggggctttaccttgcgcagcggtcgcgcggcgcatgcgcacggccggacaggtccgcggcgccctc

SEQ ID NO: 49544 - DNA, 534 bp, Mus musculus
  source 1..534: mol_type = other DNA
aagtgggcaagctttacaaagtttttttgcaatcaaaaaaattccctgagaccccgaattggcccaggttaaggaaaatctgccccaagcccctagcacaggtggaggggtcagggaaaagatatttcacggaacattaaatattcctgaaaaatctgccaaaaatcccaacaaggagatggtatttggggagtttcggtgcccgggcttgcaccactggaccccatgggtgtttttctgcccggctcccgcggtccaggggcagccaggcaggtggcgcccgagccgagcgcatctcgacccctcgtcccaggtgagggaggggccgcggggacccggcgccctgggggtcgggcctaggcgcccgggactcgcccaaggtcactgtgcgggctggggcgggggcggtgcggggcggtcccgggcgcggtgacgcggggcccgtgctgcggcggggcccgggcgcggggggcggcgcgtcgcgtcctccttttgtgcggcgccgggctgggctgcgaaggtaaacagcgcttc

SEQ ID NO: 49545 - DNA, 616 bp, Mus musculus
  source 1..616: mol_type = other DNA
cagggcttgccttccaaagcaggctttaatggaggccagtaagggctcctgcattctcaaaatctggtacttttctcagaagaaagtcagttcctgcttagcagtgaagagcatttgcacagtttctccggacagatgaaagtattttaaaacaacccttacagcattggcgttcagagggcagcagggctgcgcccccatccctcggtccgcgcagaagggagacggctggactaaaaaagaacacgaacaactttttttttttttttttttttgctgtaaccgctccgggggcggctgtgcgtggggcgcggttccggagccccacgggcacgagcaccagcgccggcggctgcgaggtgggggccgcgcgagggccgggcggcggggcgggcggggcgtgcggggcgcgtgcgcagagcacttccgtgtttgtccccgtgactggcgcgggcgcgccgcccgccgctccgcgggagcgagcgccccagtcggtcgagcctcgccgcttgtcagcgccaccggagcggtccgttccgcccagccccgcccgtcgcgccccgccccgccccgccccgccgccccttgcgtgcgctcggggaggcgcgtccccggc

SEQ ID NO: 49546 - DNA, 209 bp, Mus musculus
  source 1..209: mol_type = other DNA
gtctcaggatctgccaactgtgagctggtaaacatggatttcagctcatgtggagagcaaacagactggatggggcccattcagcagactcatccaaatataatgtttttgcagctgcctgggcagctcggaatacttcctaaagaaataatagcacagcaatatgtttgacttatttttcttccactgaacaggaaaaaaagctctcc

SEQ ID NO: 49547 - DNA, 450 bp, Mus musculus
  source 1..450: mol_type = other DNA
acgccgcggggttgcgaaagcgcccagagcctgacgtcattgaccatcagctgactgtgttcagggcccgagcttcactggctgcagccgcagtcgctgtggcagaggtccacctgcagaatgggcagactggtactaggcaggaatgctgcctccaggaggcccctggaaatgcctttccgaaggtcctccttagttttaatctgaaagttggcattaaatacatcgctctcgagtggggagggcggaaatgagccccgcgcgatcctggctctgcacctgccaagggcaggagccagtgagcgggcgcggccagctggagcgctccaccgcagagctgccaggctcggggctccagcagcccgcgctcgctcgacccaccggtgcggccctagacctgcacccctcccccacccccatcctgggttccgggggcgtggtttggcgcgg

SEQ ID NO: 49548 - DNA, 282 bp, Mus musculus
  source 1..282: mol_type = other DNA
ttgagagtcagaggaaaactgcagcctacaggtaaagtgtggcatttcctcgggaaaccacaatgtggtttttcttcttcagacagcagtttctggaagactcaaggccagacctgccccccccaagcacagatatcattgatactcctttcttgattgggaaacttcaaggaagtatcactaccagggttcagagcctggaatgctcgaatgcctcctgtgccctgaagtgtgcccggcgggccaagggttaaacgcggcgggagcccccggagcggggca

SEQ ID NO: 49549 - DNA, 395 bp, Mus musculus
  source 1..395: mol_type = other DNA
ttctgttttattccaagttgactcaaagagtaattgcaatcttatttcttaagcagaatcaggacttagtaatatactcattactaattctatagcagaattccatgtctcttaaatgagccactttggaaacactgtggccagaggtctggccaatgttatgtgtactgcccacattagagatgccaacagggttagccaagtgttcagaacttgttcgaaagatcctggggagaaatgacattttcttctgtcctcagagaaaatgctcaactaaccaagtgcatttcaaaagcattcactcaagactattggccttaccctcaaagccaagcagtcaccgcttgggggccgagcttagcgcttgggggcggagcctcccagcggcaacgcgc

SEQ ID NO: 49550 - DNA, 487 bp, Mus musculus
  source 1..487: mol_type = other DNA
ttttcaaggaagatagaagaagtaacaaatatccttctctttggacagtcagtcacttagtaggtactcagtacttatttcttgaatgagaagaatgttctacacattcacgagagatgtaatagaacatgacatgtaatgagagactcatgagtcgcatccctggctatagctcagcactgtgttcagaggtgctgagcactagatactgcaaagcactttactgaattcactgctacagtagggtaaattgagtagggaagaatctactaaattgatctctcaggtatgtttctacttaaagccatatccttaacttttatgtcttactggatgatataattatccacagcaatgtctaaatttgatgtgtgattgaagatgtaataattaatagactaaacccctgttaaacttatctttaaatggacagtgagtgttcagaagcgtgaacttctggataattttgcaatactaatctttatat

SEQ ID NO: 49551 - DNA, 448 bp, Mus musculus
  source 1..448: mol_type = other DNA
tctaacacacaaggacaacttcttatgtggagaagcccttcaatgtggagtcttctgggaagactccactgacatctgtgtcaaatgtgatagcatatgtgagatgggataagactgtagagacaagtcctcattaccactggtggcataaagcttttttaagtgcatggatgacctccatgtagcagacatgaaagacctagggagtttaattataaagcccccatttgactaaagagtcactgtcgtaatgactaggcaagacaaagcctgcctttttcctagcaaggtgatcctcagacataatcagagagtctctgagacattgagttctttaattagagctcgggtctcctcagagggctcaagatggaactgtttaatataaagccttcacctgtgccaaggcatggcattatgattctttgactgaaatataaaagacact

SEQ ID NO: 49552 - DNA, 297 bp, Mus musculus
  source 1..297: mol_type = other DNA
tgttgacctcagtcatcatgactctttttcttccagaggaagggcaaaagagcttctaacacgcaggcctgtgggcctgggccctgaggaaaaacaaccttacttcatttagtgtttttattctacccttaaaatctgtctatgtggtttttatgtcaacagaatagtcttctggctggctgtgtgccagatgatgttgtgcccaaccaggacaggaagggagactcaattactctccggaaaggatgatctctttcactgccccaagtttgggggaagattattatccctcccccc

SEQ ID NO: 49553 - DNA, 283 bp, Mus musculus
  source 1..283: mol_type = other DNA
aatactgatatctcctaacaatcttgcagattattacatttaaatttgagaaaattgcagctcaaagatgctatagcctgtcatctattggagttgcatatgtatcagaggatagcctcataaaaatcacattattatagataatatatagcttttatagcatcctgaacttgatagcgttgatgctatctttgatatatttaggttaattggaccaagagcataataacaaacatggcttaaattttctcatgttaatatagtttgaaggaagtatgacctc

SEQ ID NO: 49554 - DNA, 554 bp, Mus musculus
  source 1..554: mol_type = other DNA
ttatgcacaaattaagcgcaatgcactgtactggtttactgtgactagaggatttaaaaaataaaaaccttttacaaattgcatttttaaaaagcaaatggagagttatatttacgtttgcaactatggcatacctacattcgcttactgccacattaaatattatctgaacatttgaggaggaatgattaatcttacccaacttttcttagagtcttcagacacttgagtcataaaaatataattgtataatatgtatgaatgtgtatatatatatataattgtagggaaaaaggttgtaattgaatggtaacaactaatctataatgaacatattttttttaagtcctaagttcttaaacaataatttaaaaagaaaaacaaaattaaaacagtctttcagttcagacatattatttaagtgtcttagactcagggatgacttttcacaagtcaaatagaatttctttgatctgggcaggactgctccttccggaagtcaggaaacccagcgccacctgcctcctgcggctgccatagaatccctgttgcca

SEQ ID NO: 49555 - DNA, 548 bp, Mus musculus
  source 1..548: mol_type = other DNA
tcagtataactctgcaactattagatatatatttcttgaatgaatgtcttttgaataaaaggatgattatgaagattttctcaatttaccaaatctcttgaaagtcagagaaaacatttctattttcactgtacacgatgaagcaagataaatataagtgtcatttgtatggggaaaaaaatagatgttttctctcagtagcactttgaatgataacttgtagatcttctcaaagttcaacagaggtagtcctatactattaattgtgaagacttgttctattagtaccctaaacttcttaggaatttttaaagattcttaagaatcttttatttgttttataaagatttctgaatttggaaagtaatatatttatagcagagtgtcgtgacaaagtatccattcaaaagagacaattctgattttgtaatacagatcattgtttgacaagtttgcccaatgtgtcaagtagctgcgccgcgccagcccggccctcgcgtaccacgtgtcaacccagcccgcttccggcgcgtcgcgggcggctgacg

SEQ ID NO: 49556 - DNA, 516 bp, Mus musculus
  source 1..516: mol_type = other DNA
atgctatttcttttcttcccttttcagattaaaaaaaaaaaaaaaaaacaggaagggacatttggaattctgtttgctcttaagttttacctgttttaaacagtggctaaaacattataagatttttttttaagctagaaagattaatgtaagaacatgttctaagcatctcctattgataccttgagaatatatgcattctcttcaaatactcggttacttaatgtaaatgggctatagtgaagtatagtgaagtaacgaaattgtcattatgggcacaatgttgagttaataatagaaaccttacccagagtctggcataatttgattatgaaatgtgaaatttaagaaaaataatcctagcactcggaatctcagcactcggaatcccagcactcaggaggcagaggcaggcggatttctgagtttgaggccagcctggtctacaaagtgagttccaggacagccagggctaaaaagaaaactcatttgcaagtctttatgttaaaatgatgc

SEQ ID NO: 49557 - DNA, 371 bp, Mus musculus
  source 1..371: mol_type = other DNA
ttgaagagagcctgcagacaagtaggtatgcatggccactatcttctcagcttcgtttagaagaaggacacctccttcttctcaggaataatgatgggccttacctctagcttggtgtgcacatatacatgtgtgctcatgcatgcaagaggtatacttggattccttcagtacgattctgaattcaatattaatgacaacagaattgtcctgttttgtttttacagtattacctacagatattaggcttacagttttatgatgaacttctgttggcatttgcctgtaaaaaaaagttttaatgccaacctcactgaccacttgagtattcttagaccatgaacaggagagcactgcttgccactgtgcta

SEQ ID NO: 49558 - DNA, 345 bp, Mus musculus
  source 1..345: mol_type = other DNA
aaatgggaaaacctctatccatatttatggccatatcctggaagacacagcgtctgtaagactttcttttcaaagcacttgtccaaagtccctggatttgaatgtttgtcatgataatctgctttaactcagctttgtggcaactacccaaaatcttggaggggcagcccaccatgaagcaaatgagatcatgaagctggctttgcaagcctttaacatgggcaatagtgttggaggaatggaaacttttgccaccaacagcatttgctagcaacttcctaaaaaacagcccccttttaagaagcaggctgcttgagaaatgatgcaccatgtgctctgaactag

SEQ ID NO: 49559 - DNA, 326 bp, Mus musculus
  source 1..326: mol_type = other DNA
cttagaaatgccttttaaatccaccatttattcgctatccatccgcaaaggtctgcggctcccagtcaaagcggtggctttacgcctcgtccctcgggttgaccccacgggcttcgagcctctcgggagggcctccacccagcccgctgctgtccacgttgagcttgcaggaagccccaagctggggggcgcccgagcgccaaggggcgggcgctggccgtgctgggcgcgccggagtcacggctgggaccgggcgggcgaaagcgactcctccccggacgccccgcctctcactcccgttacacccgggggaaggtgaacctctg

SEQ ID NO: 49560 - DNA, 367 bp, Mus musculus
  source 1..367: mol_type = other DNA
cgttctggggaccacaaactgcagtccgtagagtgcttacagctgagggagtccttatgcacacgcgcacgagcgcgcacgggcacaccacgctaccactcggtgggcacacgttcgctgcacacgccgcggtcccgagagcggatcacagggaggagcggcaggcagggccgggcagtctctccagtcgcgcccctgcaaaggcttgcgcaacaggcggcggctccagcccgccccgcccagcccaggcagggtgcagcacgaggcgggccggagaaaggggtgtgtccccgtctcctgctgcgctgggagcagagggtctgggaggggcgaggccctgggggcggggccccggcgcctataaaat

SEQ ID NO: 49561 - DNA, 365 bp, Mus musculus
  source 1..365: mol_type = other DNA
cactggctggcagtacctaggagatgaccttcatcactctggtttttctagatgcagaggctatagatctgtttctagggtctggaaagaaccaaggccaggagttctgtccttccaagaataacctggcagagcagcctggctgggagaggacagtgggtatggccttgaggagcagggcagaccctgctgacagatcgcacctccaggcgtgtcagtgataaattcttgtcatttctggctggaatttttttcttgcctctgactcagagggagagcctgagccctcctagagcgtggaggatgctgggtgagtgacgtcagcgctttgacaaacgcccccgggggctgaggaaggctctccg

SEQ ID NO: 49562 - DNA, 284 bp, Mus musculus
  source 1..284: mol_type = other DNA
tttcctcttaacattccacggaaaagttgtagatgagatagttcagtgagagactgacaaaccagatcttagaaatgccttttaaatccaccatttattcgctatccatccgcaaaggtctgcggctcccagtcaaagcggtggctttacgcctcgtccctcgggttgaccccacgggcttcgagcctctcgggagggcctccacccagcccgctgctgtccacgttgagcttgcaggaagccccaagctggggggcgcccgagcgccaaggggcgggcgctgg

SEQ ID NO: 49563 - DNA, 277 bp, Mus musculus
  source 1..277: mol_type = other DNA
cacttggtattctaatttcaatgaactgttttagaatgatacactcctatgtgttgtaggacactgatcaggaactctcctgtggtccctggaaactgaaactggcctgtagcagagcacagtttcagggactcctctgggttccttctgtagtgacacaagagagctgcctatcctcagcctccttggcaaattgtcagtttcatctgccttttaattagaaaaagagagggaaaaagagtgtgtgtgctttgtaaaggaattaatatgtcccttt

SEQ ID NO: 49564 - DNA, 384 bp, Mus musculus
  source 1..384: mol_type = other DNA
ggctgcccagacacttttttacaatggctaatttaaaaacctttctaaaagatagctttaccagcacaagtacgactgttattattatatatatacttaattggccaagaacagacgcttcctgcagcgtgcggagggggctgctcgtcccggaccctgggagagcctgcctgggccaacagtatgcaaaggggcgcactagcctgcccacgagaggattcaggacattccgggtcctgactcccacgtcccaggatcacagcgtcccgccccgggcgtggcccaagccggcacctagggtagccgcgagcatgcgcactgtgccttcgtgccgagggcggttccccgcgaccgacgtcgctacgtaggcgtcggatccccggg

SEQ ID NO: 49565 - DNA, 327 bp, Mus musculus
  source 1..327: mol_type = other DNA
acagtgttatatgtaattttatttcctaatttaaggacttcttccctgatgaaagtattccaagagtaacttttaatgtttagtaaaggaatttggtgatttttttttttaattaaatcaggaacacagaaataccccttgctaccatgttttaaataatggcccatggtagagattgcccatcaaatgggctcctataaatggatgtgtgtgtgtgtgtgtgagagagagagagagagaaagagagaacgataaatgtttgctgtttctgtggtgaagatatttttttttcaacagattctgcaaaattgtctgagcctcactcag

SEQ ID NO: 49566 - DNA, 443 bp, Mus musculus
  source 1..443: mol_type = other DNA
atcctctgaacagggactcaggagtccttggtctagtgtgagacatttattccacacacctcagaggatctaaaaggagcctaggagagcgggtctggttgcctgagggcgacagaagacatcaccaccatgcgtggtgtggtaggtggaggcgtcctgcccggcggtattttccctaagttgggcaagttcgtggtgctttggcaaaccaggagtctggtcgcactgcctgttcccagagcctggcagtatgaacctgggctccaaaggctctagccctggatcccctgatctagggaccgcatgtccccgctgcgggcccgcgcagtcccagtgcccccacgaggcggcgcgcgccgggcggtcagcatagcgcgcaggcgcggcgggcggggcggggagggcgcggggcactgcgcggcggctcagagcgcgcggggtgg

SEQ ID NO: 49567 - DNA, 625 bp, Mus musculus
  source 1..625: mol_type = other DNA
aaagaaagttgtaataatgtacttgggtacaccagtacaccaatgttttcttagaaatcactggctttttgtaaacttaattgcttcaatagactttaattttttaagttaatttatatgtctcagattaaagttaatctataaagtacaaatttactattatcacttaatctttcttttctctttcaggaaactaatagaagaaacaaaagcaaaatgtttcggtgttgttttgtaagcccacattcctaacctagttcagctaaggatagggaggaagatattagaatctttctcagcatagagttactgccagcaaaacttgtgtctaaattaagacagtttggttaatgagaaacttcaattctaatagtactatcacttaggactatggtcaatctactttttagattgttatttattattaattttgaaattctggatttgtcatatacatctggtagaaaaatgtgtccatgaacatagaaaagtttgtattgaatcttttctaattagataattcaagagacattactatcttcccttattaactaagctccgcagttgtgtgctgtcagaaagtctgtgtctgtaaacatccagctgtaagccacagccaagcttt

SEQ ID NO: 49568 - DNA, 527 bp, Mus musculus
  source 1..527: mol_type = other DNA
cttgtgagtctctgggttaagagaccaatatctattttgatatgatgatttttagatctaaatgaacttcactgtagaggatatgtatatacaagtctagatttagtggctcttgccatgctatttaatggacagtagattgatgatgtcttaaagtaaaaacattgatctgacttatttacttattaaattcattaacttacactcactattcatttactaacttactgtcacacactcactaactcatcaacatgttgaagactaagtttttcaccgttatttccatttctcacttcacaaatacaggattaattatttattagattttaaattatattatactgagttacatgcaagtgtataatgagtattcaaaatagagtatgtatcttcacttgttgtgtatacataaaatgagagaaaatcagactcttttttgagacatattaatttaataatatataatgttcacataatatgatcatgttcaattgcatgtattttccttcaaatgatgtaattac

SEQ ID NO: 49569 - DNA, 529 bp, Mus musculus
  source 1..529: mol_type = other DNA
acacaagaacttcttgacactgtcatagtgagatgatgtagtgtttagcatgaagaacatctgtaaatgatgaatgggctgttgctcaatgaccattgcacatttagtagaaagaaacctctccgcgcggagactgagcatgctcctggccaggttggcccagcatcttgcgccctccacaggccgggcgggctggcaggagagcctatggccgcagggcagcctggcgcgcctagactcttctggcggacagaggtgggggacgctagcggcgcctcccagctagtcgcgcaatctaccgcggtgcaccgaggctgcaggggcagagctgagcggcagggctttctaggccttgagcgcgctctccacggcccaagtagaggctcccagtcttctcctaggaccttagctcgggctgccaggaggccgcggtggccgggcagctgttgcaccaagagggggcagctgcggagtagcaaccgcatcagcaccacggcggcagtggcggcggcggcggcggtgagggcag

SEQ ID NO: 49570 - DNA, 298 bp, Mus musculus
  source 1..298: mol_type = other DNA
ttgtgtctgtttataaatgttgctacacaggcagccaaataaagacagtctgcagactccaattaagcaatgttctcatatttcaaaagcccatttttaggaacagtgctcagagctctttctctcctccgaactgtccctggcacgaggactggacaaggggcactgtgcacacacgcccccgtgggttatttcagagctctctgtaaagggaccaaaatatctagtgtgaagtccttaactggatggactaaggctgagccctcggctcctcccctgtgccgggagctcttagccg

SEQ ID NO: 49571 - DNA, 373 bp, Mus musculus
  source 1..373: mol_type = other DNA
ccatcttgtcaccggctgccagcagaagaggtgctctgtggaactcagatcatgatctccagtgaggctcaagagtcacatagcaacttcctgtttggtggtgggtctgacaccagagtgtcccctgtcacacagcctgtgatgtttggcaaagggcaggaagaatcttcatgcctcacctgatggcctggctttctagaaggaagggttagaaagccagatagctagctatagaatcagagcggctggttgtctccatcacaactccatagtgtgttttctgagacgctctggagccatcccacttgcctgcactgcctgatagcatgcacacatgtcagcatggacctgagtcccatgcttacacagggga

SEQ ID NO: 49572 - DNA, 253 bp, Mus musculus
  source 1..253: mol_type = other DNA
acatagtaaataaatgcttgctagcttaaagctattgttgactgtcactacattttaatgcatttttaattgaaaagaaatgcatacatataagggagagtctccccttgcacactgtaacctctatacattaccgtttgtgtgtgtgtgtgtgtgtgagagagagagagagagaactggcggttcccacgtaggcacctccccaggtcttcgggaaaacccggggcagatcttaggccgaagcacgacttgc

SEQ ID NO: 49573 - DNA, 344 bp, Mus musculus
  source 1..344: mol_type = other DNA
ctcaggccagcctggtctacaaaggtctgtggggatcttagaaccaatcccccaatagatactgagggacagttgtatcttatgtttattggactaggatatactacggtaatgagtttcttcaacaagaccttgtgtggccaggctggctcagttcacctgtctgcttagcaggctaatccccatacaggacaaatctgtgcagctcgggactgcccgagcaagcactcggacgcctgagagcgcttcttccgggagactgccccggcgtttccgagagggattttcccgggcgccggctcccaggctttcgggccaccgcgctccacagcgtctgcgcaggc

SEQ ID NO: 49574 - DNA, 389 bp, Mus musculus
  source 1..389: mol_type = other DNA
ctcaaagcgttttattatacctgagtaaattatcagagatcacaaatcactgcttgattcaggcaaatggaactggctcttaaagtggccccaggcactcctaaacgatctttcggaccgtctcctgtgaccgtgagggacccaggcctagtccgcagaccctggggcggccacaggggccacctcgtcatcccggaacagcgctatccgcggacgacgccacgcccgcacagcttaggagccgggcgcgccggactgctctgcgcaggcgcggtccgcactgcgcaggcgtagagctctgcgctgaggtgaggcattgcgcgccgcgaggtgtgggcgcgcgctccccagccacggcgcacgcgcgggcccgcgccgactcagcacgg

SEQ ID NO: 49575 - DNA, 408 bp, Mus musculus
  source 1..408: mol_type = other DNA
tcagtatgggctttgaagacattgcaaagcctgcagggcgaggcaggagctgacacacccgcctcttctgcggaggcccagatctgctccctgacagacgcgcacgggtctggccgcgtcctcccgtcgccgtttcgttaataacttaaagagccaggcaggggcgggtgcgtggcgggacgcggccgaggctctgccactcggcgcgggaggactccgactctggtcgcagtgccgggctggccgcgcccggaaaccagacgtcgcctcgctcggccgcagggaaggtctcggctcgcgtgccctgggggtccctcattcagggcaagcacgcggggggccgccacagcgagtccccccccccccatcccgccggcgcgccgctcccgccgcctccgcccgccgccc

SEQ ID NO: 49576 - DNA, 284 bp, Mus musculus
  source 1..284: mol_type = other DNA
tgtgtgtgatacccatatatacattagtttaatacacttcattaaaaaactcaaagcgttttattatacctgagtaaattatcagagatcacaaatcactgcttgattcaggcaaatggaactggctcttaaagtggccccaggcactcctaaacgatctttcggaccgtctcctgtgaccgtgagggacccaggcctagtccgcagaccctggggcggccacaggggccacctcgtcatcccggaacagcgctatccgcggacgacgccacgcccgcacagct

SEQ ID NO: 49577 - DNA, 384 bp, Mus musculus
  source 1..384: mol_type = other DNA
ctccgctcaggtctgtgcctagctgaggccatctcagatgagctaatgcaagagtcagataagcaggtataaaactttaatatcagtgacatgggctgcagaggtcaggcagcctacaggctggctaggctgcttcccaggttttgctcccaagacttgttttttgacaaatatttgacgctactagtgtttttgttttttaatatataatatataattcctggaaaagttagctactcatcaggagtggatcttcacaagtcctggaggtggcaggagacggggctggatgacgtggctggtcacctggggatgccgcccattccttccgtattccgggggacaggagggcttgtgtggcggcagagtccgccgtccggccag

SEQ ID NO: 49578 - DNA, 299 bp, Mus musculus
  source 1..299: mol_type = other DNA
ttgccccagtgggaaagatacaacaagacaccactggagcctctaagggcttctgcagcagtgtgagctctgagggcccggggggtctcctgcacacagccctccctggtgagaccatcctctgccagctgtctgtggttacaggctgctgcgactggacgggacccacccagtagctgttctaagacaagggaaggtgtggtatctccgaccccaccaccacccgccccccttcctctaggcagccaggccagcaggggttgggagggagaccgctccgcccccacccctcccacccc

SEQ ID NO: 49579 - DNA, 302 bp, Mus musculus
  source 1..302: mol_type = other DNA
attcagggcctcgatgcctcgcggagatgtgttccagacccccgaactgcactgtgccagtgtcccttgtgttaatcagttgctgcaggaaatggccattttaaatgttaacaaaatgctacaaatatatgttgaaaagatatcgaggcccacaggtgctgccctgtgtgcctgcctttattcttaaaagcaagcagtataaaaggtgtccactggaccacttgcctaacttgtgcggattcttgcctaactttgaagttacaaagaatatgcacgcatgtaacttgtgtaaagttataaat

SEQ ID NO: 49580 - DNA, 242 bp, Mus musculus
  source 1..242: mol_type = other DNA
tccagctacctggctatgctccagcctggacgttatcagccctgcttacctgggccagggttgcagggccaggcctctgtctgggagccgggcttgggccagggttcccagcaaggcaaggcctcggggagtgcaccagaaggctcccagggcggtgcagccactggggcaggtgcggaagggttcctgcctgggatgccctaggacagaactcctgctcaggggatgccctggaatcctcc

SEQ ID NO: 49581 - DNA, 409 bp, Mus musculus
  source 1..409: mol_type = other DNA
gccagcctggtctacaaagtgagttccaggacagccatggctatatacagctctattccccgttcatcttgaaggttccgagagctagtctctgagccggatctccgaggcgcccttctcccaggtccccagacccagtgactattgcttgctggccctttctttaggagacctatggagaagcagaggcctctaggagctccgatgagcctctggcctggggtgcctaggctatggggcacaagaaatcgaccacaagaaatcggtttctagtggatcctctgagaccacgcgcgcgcgtgcgacagcgtgcaccggtacactcccattgggtcgtgcccccacgtgacccggtgcgcgccccgagacggcgacgccgaggccgcgcccctgcgcgcgcacgtcctga

SEQ ID NO: 49582 - DNA, 426 bp, Mus musculus
  source 1..426: mol_type = other DNA
atgctccagcctggacgttatcagccctgcttacctgggccagggttgcagggccaggcctctgtctgggagccgggcttgggccagggttcccagcaaggcaaggcctcggggagtgcaccagaaggctcccagggcggtgcagccactggggcaggtgcggaagggttcctgcctgggatgccctaggacagaactcctgctcaggggatgccctggaatcctccgctgagcacacagtagctgttcagtgaagggttcctcctggcttgtggcccctctgcagaaggaggtctcctacccagcaggatgcagaggggatggcaggcgggtccgcggtggtcctctcccttgtgcgggagccgctgtgagtcgggtcgcccgccggtcaccgcccccccacgtgacgccgggcgctataaatag

SEQ ID NO: 49583 - DNA, 242 bp, Mus musculus
  source 1..242: mol_type = other DNA
gattttctcaaagaaccagatcctggttggtttctttgtggaggcacacagagctgagttttaaattctaaaaagtctttaatttctttatttcttccttgaccaagttatcattaagttgataggatgaatgggattatttcaagagaagaaagtatattcttttgttttaaaatgaaatcttctatagatatctgttaaatccatttgatcaacttttgattgaaagttgattttattca

SEQ ID NO: 49584 - DNA, 361 bp, Mus musculus
  source 1..361: mol_type = other DNA
gccccagccccagctgactgccccaccctgaggctgggcttcctcctttgcctcccacactttgtgggtgaagctgggtccccactgttattagactgggatggtggccaccgtttggtgtgggacactttgccccaccctctacttagagcctcagctggcctcaatccaggccaggcatgtctgtgcaatagcacccagataggatagcatagcatctcatgtgttcagctggagccctcaagagcagcagcctaggctcttcgtcctggaacagtgctggcaccacagcactgtctctagaagggtgctgtggacactggagccattatgacctcagggtgaggtcagggccagccag

SEQ ID NO: 49585 - DNA, 496 bp, Mus musculus
  source 1..496: mol_type = other DNA
caagtccagatgctcttgtgtggaaacgggcctccagcccacaggctggagcctggccctttcactaaaggaagccttactgcttgatatcacacgatgtagagatgtcagtccttgcctaaaattttcgacctaattccaggaaatcctctcggatttgaaggcaggctggagactgtcagaactccttcctgacgccagctcagctactccttggaggggggatgaagtccttttccacctgactctcagactcactaggcggttgagaaggtgcaggcatcgtgtcccgcgtcccctccccggcttccctggttcacggtacagggcgaggccagaagcttcgggagggaaggcggcggcggcgggcgccagcagcaccaagccgggtggcctgccagcgccggcgtagctcagcgccaggcgctccaggcgccgcttgcgctcggccgcctgcgccgtggcgtgcaggggtcgcagcagcgctgggggaggc

SEQ ID NO: 49586 - DNA, 228 bp, Mus musculus
  source 1..228: mol_type = other DNA
tacaaaaggttttgagttcagggcaaatcacaaattccaggactcttgttgtcagcctagacctagagtgtccatcccctttgggtccctaactctctctccacccatggatggaaactggcaggcagggacacttgaccggtcaggcccaaatgaagtggttcagtgccccacccctgctctccctggaagggccccagtggtctgtgcactgctcctggaggagag

SEQ ID NO: 49587 - DNA, 655 bp, Mus musculus
  source 1..655: mol_type = other DNA
cgtccccgcgcgcgcaaatttggggccttggaagggggtgtaggttgcccgccgagtcagtcccgcaagcctgcctgcgggctccgggtcccgagaggtggacacggcgcgagttcggagatccccgagcgcctagcgcccggcacggggccctacgcccatagcccatgaggccagagcgcccccaaggccaagggatgtgccagggcccgcggacacgcgggtcgggagagaaggacgcttgtccctgcctcgatcctgcgcgggggcggagaggaggcgattttgtcgccttcggcttcctttgctcaaaggctcttgggcctctctgcggcgtccaggccggctggattccgaggcggctctgcgcctgcggacacagcccagggagcagcgggccccaggcagggcccggcgagcggcaggggcctgggcagcttcccatggcgccctggtctctggctgcccgcctggcccagttctgcctcccagagcgggtctggggacgcggagtcggtccccaggggatgccgcgggctccaggcccaagcgaccggcgccgggctgcggtggtggagggcgggagggccgggcgcgctgctgcggacgaccaagagagggcgcccgagctgcgctgcgctgcgccgcgccgcgc

SEQ ID NO: 49588 - DNA, 295 bp, Mus musculus
  source 1..295: mol_type = other DNA
gagcctgggatgagtgtcaccctggagcctctgctccagcacctgtggccgtggcttccgtgaccgcactcgcacctgcaggccccctcagtttggaggcagatggacccagcaggccacttgccggttgcgggacccagcttgatccacctcaggttcatctcagggtgctcagaggttaaaacctcagaccacactagtctgagtagtcccaggtgggttaggccaggccttccttcctcccccgggccgggcagtggatggaaactggaacgaatggtccagctggagcacc

SEQ ID NO: 49589 - DNA, 363 bp, Mus musculus
  source 1..363: mol_type = other DNA
ggaagcagagtctcctgcaaagtctctttttccctcagggagctgttgggagtcccaagagcgctgaatcttgatgcaggcagggcccaaactggaccagatcctgtaagccagaggtatggttttacatcttctgcttgcctttcaaaaaccacaaacaaaacctcacggctttttaaattttaagtagcattttttttaaaaaatcacaatatattgggaaagtggatcttaaattaaaattctgggtctttgtccctaggaagaatcggtgaacagtgattttttgggcatttctacttttaatccttggactaaattcctgaaagtagagtctgtatcacccaggtcacctctgcaaga

SEQ ID NO: 49590 - DNA, 282 bp, Mus musculus
  source 1..282: mol_type = other DNA
aggggcctccctctagagggaatctcagcttccggcttgagaagcttctggtccagtccggccactcagtggcacttctgttagcctcatcctcgctgcccaggactaggtagaggagagtgtctccggtccccaaaatccctcccggtgggagccttgagggcaaggcggggcctgcggcaggagagggcgcgggcgggctctggcgcggagcctgggcgccgccaatgggagccagggctccacgagctgccgcccacgggccccgcgcagcataaatag

SEQ ID NO: 49591 - DNA, 523 bp, Mus musculus
  source 1..523: mol_type = other DNA
gtagataggcaggcccattcctgtctacatagagaggacatctggctggcctcccaaagccttgggctgggaaagggtaaagccttccactgagttccaaaaaggtggcccctggcacttcctgtagggcaagctcaaccccagggccagagggtgaaagatggaagctggcaactttctgtttagagacctgccccagatcctggtgcatccagaatagcctgggaagtttccagcagctggccagctccctgcagggagggttggagccgcagataccctggcggccggtcctggaggatgcagccgcgcggccgcgcgggatggagccatcccaaggtcaccagctccgaagagccccgggctgtgaggctggggtactccgggacggcccctcgcgcgcccccgcgccagggcctcgggctcgcgcgggctcgcggccgggcaagctggcgggcggggcggccgggccccgggccagctcccgcctccctcccgccgctcccgcggctcgcgctcccgc

SEQ ID NO: 49592 - DNA, 346 bp, Mus musculus
  source 1..346: mol_type = other DNA
agcttgccaccggccagctgtgtatagtgtgcataccactggcacacagtatttgttgtgggcacttcacccagagtctactctcacccaggcagccgaggaattcctcagcaacttaggctaccgggaggctttagtgactgaagacacccacttcagaaatgaaatttttgccatctcagctgaccttgggaagaactgttccaagggaacactgataaccaaggaccacttgacctttcttcccgcaggtcctgagacgtctggggccgagcttgcccggtctgcggagccgaggggatgctcgagtcccgaatgcgactcgattcccgagcgatgatcgtcc

SEQ ID NO: 49593 - DNA, 387 bp, Mus musculus
  source 1..387: mol_type = other DNA
cacatgttttctcccacttctgaggacccagggtactgagatcagggtgccaacaggtctttagctcttgaactcgcaggttcagggatctagagagattcaaatctcatcatcagcatcgtctaaattggacacgttttgaatcctagctaaaagacaaccggcgggccttgggtacctcccaccgcaaggtggcgttggacccagccttccgtccgtgctctccgggccatggctcccaggatcggacgctccgctcgaagattccgttcctcaggaaacgcgaagcgccctgtggcttttgttgttcggaggctgagccgctgggcccagcgacctagacaccaccgagacagaagtctcccggtggtctagagcgtcccccgg

SEQ ID NO: 49594 - DNA, 303 bp, Mus musculus
  source 1..303: mol_type = other DNA
caaagtgggtctgggggagagccaaacacacccagtggtagcctgcctcccctttcccgggaagcaacctcagaagagcatctatttagtggcaccttctgaacctcagaagagcatctatttagtggcaccttctagcagccagtcattgtcatttgaagcagtcaactgctactactgtctgctcaaggggcaagggccccagaaaggcaatactgtcttgatccccaccctgggaaggcagtgccctcaggtgacctgtcactgttgactgtgggtagcagagcctcccctactagctga

SEQ ID NO: 49595 - DNA, 352 bp, Mus musculus
  source 1..352: mol_type = other DNA
ccctaataggcagtgaattccttgtctctccagagaccccacactccttaaagctcgcttcctctggtcagtcagctcagcatggtgggccatcagctccctaccagtcactacaggatgcattaaaagagtcccaggggccaagttccccagctgctccgcagaagttctggaattctttgggctcatctgagctaccactcttgcacctgcagggccgagcgccgtagccaggtggcgctgtactgctcggagcgtcccgccgtgacccgccccgcccgcgagctactccagctcacggcgccgctgcctctggagtactccccctcggactgctggaagagttggtgcg

SEQ ID NO: 49596 - DNA, 261 bp, Mus musculus
  source 1..261: mol_type = other DNA
tccttcactaagaagctcaagcttcttttatcaggcagatataaagcagccttgtacctgagcctcaggggtattcacatagctgaggcaagaggctcatctgagagccagttgagccaggctctaaaaggcttcctcagttgagggacagcagagcatggtgtcgagtactggaggtgcaccagcagaagccaaaaggtccatagaggggccccaccctgggatggtaggtgatgatggctcccatccaccacccacacc

SEQ ID NO: 49597 - DNA, 320 bp, Mus musculus
  source 1..320: mol_type = other DNA
gacagacagacagacagacagacagacaggcagaattatgtttgttgctacttcataactgtaattttgctactgttatgaatcataatgtaatttttttttaaagatagagtgctgtccctacctcttgaccttcagtggagagaggaaggaggagtcagtggcaatttggcacaccccaccttccccctgaccacttcagaggagctgggaggtgcaagatcatcttggaaagattccatccaagagctgctgggccaaagctttgctggaaaagtgcaggagagctcgaggtccgagggagccccagggagccctgg

SEQ ID NO: 49598 - DNA, 317 bp, Mus musculus
  source 1..317: mol_type = other DNA
tgacaagcctcagagtatgctgagaaactgattcttaatcccacatccttgttaattaatactgaggaagagagtcttactctagtagcttctcaacccccgggttgaggggatcccaccagcgtagacacatggcgtctcttgcctcatgattctcctggctctcctagtcctgggagggacaggacatctgatttagcagattaggaaactggcctgggcacatccctactccatggaggagggaagaaggcttgtgaaattgtacctggctctgccagctctcatctgagccaggttgcaagtgactcagggct

SEQ ID NO: 49599 - DNA, 365 bp, Mus musculus
  source 1..365: mol_type = other DNA
cgagccctggctgccctggaacttcctttgtaaaccaggctggcggcatgcagactttattttcttcctcccacaacaggaaaaaaagtagaactattaaaatttggctgcttttgaaacacaataaaaataaaatgaattttagctacatagagcaattatttagtggcacacttttgatggtaagaactgcttgtcagccattggattcctctaaggcttgctcgaaagcgttgctatggatcccgtagtgcctcttcccagagtcagcatgcccacacagtgcagcttggaacctgaggagaattttcaggaggtgtatactctcaatcttcacatgagtgagactgagcctacagaaggca

SEQ ID NO: 49600 - DNA, 314 bp, Mus musculus
  source 1..314: mol_type = other DNA
gcagggaccctgaatttcaggcctttcctgtgccttccaggtgccgcaaatccgacactgttggggttgggtccttgatccaagtccccactgggtcaacgatgcactgagcccagagcagaagaaggtgctctgcgcctcccaacctgtaggtattgagacttccagcataggctggtctggagccagaatggtctgccaggcttctgaccacagccaaccctgctcaggaaggctgcggggctgaggggaccaggcactccagtccctccagcctgtactgagggcacagctcctgtctcatctataagatc

SEQ ID NO: 49601 - DNA, 44 bp, Mus musculus
  source 1..44: mol_type = other DNA
ttggagcccttactgtggctgagcctctctgtaacccgtcaggc

SEQ ID NO: 49602 - DNA, 248 bp, Mus musculus
  source 1..248: mol_type = other DNA
gcgtatagaaagggattcaggttctgtatggatacctagtaaggatgtgagagctcccatctctcagccttcaacaactgtgtgcacactgagattgaaggagccagcttcccccattaaattggggttgctatctctctgatgtgatggagaacaacgctgtcacttccaaagggcaggccaaagggcaccttggaggtgaggagcctgggtgacatgagtcaggccagccctgctgccggtaggca

SEQ ID NO: 49603 - DNA, 263 bp, Mus musculus
  source 1..263: mol_type = other DNA
actctacttgttaaaagtactggcagcaaaggatcctatttaatgctgtttacttaaaaacaaatagtgtacatattattacctatgtttatcataaggacaaagttatccactgatcaatcaacatctaagttgcaaacacattcttaacggagactgtttaaacatgggagttctctaaatctgcagattcgttcacggaactaatctgaacacaggctctggcaccacatcttgtcagagttgccaggaaggcagactct

SEQ ID NO: 49604 - DNA, 337 bp, Mus musculus
  source 1..337: mol_type = other DNA
ggatcctatttaatgctgtttacttaaaaacaaatagtgtacatattattacctatgtttatcataaggacaaagttatccactgatcaatcaacatctaagttgcaaacacattcttaacggagactgtttaaacatgggagttctctaaatctgcagattcgttcacggaactaatctgaacacaggctctggcaccacatcttgtcagagttgccaggaaggcagactctgagctctccgtcctccctgggcggacctcaatgagacgcggaggctgcggggccatgttccagaaggggaccaacggcaccctgtagggggcagtgtggagctg

SEQ ID NO: 49605 - DNA, 24 bp, Mus musculus
  source 1..24: mol_type = other DNA
ttggagcccttactgtggctaaga

SEQ ID NO: 49606 - DNA, 353 bp, Mus musculus
  source 1..353: mol_type = other DNA
ggttacacagaaagaccttgatctcttctgtatcagaaacatcagaaatgtttatgtaaatacgtatgtatacacacatgcacatacatgtgtggggtatgtgtgtatgcatgcatgtgtatgtgtgtgggcacaggtatgtacatttgactatgatctgaacaaatggatttcactgtcaattctcaatttgaagagaaatgagaaaatttctagtgatttttaagtcaggatgaatcattcaagctcccagaaagaaggctcaaacgaccattggacattttttgagtgttcaagtagagtctgcacctgaccaggcaggaccagggagaaggccacctccttcctctacc

SEQ ID NO: 49607 - DNA, 462 bp, Mus musculus
  source 1..462: mol_type = other DNA
attgggccatgttacagactcagatgtgatgatcttctgtgacagaaaccctgaagatgctgaggttcagtatgagaggacagtcctggcccaggagcaggcttgctctcaggatctcatgtgccactgtgacatcaccaccaggatgccacaactgttattctggtttcacatgtagcaacaatgaaagctttgttcctttttacagaaactgaattcaagcttgtttggggaaaaatacaatgcttttataaacgttctagtccttagatttattttcactaaagccacaaaaaaaaaaaaccaagtctattaaaagaaaccaaggtcttctatgatatcttcaaaagagaaaggatccatccgtcttcctttttccatctagggggacgagagagtggtctctgccccctctacctccactagcaggctgtgcactgccagaatccagggacagtttct

SEQ ID NO: 49608 - DNA, 170 bp, Mus musculus
  source 1..170: mol_type = other DNA
tggctgttgccaggtaactggagtcttgctgtcagcaaaagcacccaacccttagctgttctagcttagctacagggcaacttggcacatgtgaccacaatcccctgagttggggcttcagcacttaagatgagaaccaaaaccggatgcctgggctggatcctctgttc

SEQ ID NO: 49609 - DNA, 198 bp, Mus musculus
  source 1..198: mol_type = other DNA
agtcttgctgtcagcaaaagcacccaacccttagctgttctagcttagctacagggcaacttggcacatgtgaccacaatcccctgagttggggcttcagcacttaagatgagaaccaaaaccggatgcctgggctggatcctctgttcagatctgttcaaaccagtgctgcaatgactggcccagacgggctcagcc

SEQ ID NO: 49610 - DNA, 217 bp, Mus musculus
  source 1..217: mol_type = other DNA
ttcccctttctttgttataatatggagacacaattcaatggtcagccagtggtcactgacctttattggccatggattgaatgaatatcattattgattccctcacaggccatggagagtaacctcactgggcttgttggagtgagggacccaaagaggccttgggggatgcccccttatgggcggtacttttttttaaaaagatgggcacagcgct

SEQ ID NO: 49611 - DNA, 265 bp, Mus musculus
  source 1..265: mol_type = other DNA
tggggcttcagcacttaagatgagaaccaaaaccggatgcctgggctggatcctctgttcagatctgttcaaaccagtgctgcaatgactggcccagacgggctcagccgtgatgaggcatccttggtccaggacttcctcagcctcaggatgcaggccttcgccagggctctgatgccacattgtagggcggtctcagccaggcttctgggtaccaccggggaccgccgccgtgggcgcatagcttgggacccctgtcgtgggc

SEQ ID NO: 49612 - DNA, 229 bp, Mus musculus
  source 1..229: mol_type = other DNA
gacaccggagttggatgtacatgcagatccaaagtagatgtgctcagcttcacctgtgagcacagctgttcagtggtgtcatcagagcctactgggggcttgtcaggagggccattggctctgagcaggttgcagaagcagcagctgcagcacacacctttgatggctatgtgttggagactgcctcatctacaaaggctgagcaagctgtcgccttccctggctttct

SEQ ID NO: 49613 - DNA, 271 bp, Mus musculus
  source 1..271: mol_type = other DNA
ctgtttgcttatatgatatattatagggtaaggccttccctgcttaagtggggtgcgctcgtgagcacagctgtaacttccatcccagttagagtaaattgttttcctgcttataggaaggagggccattggctctgagggacagagagaaactttgtcttgacttcttcccttgctttctaattggcaagcacaagtcaactttgatcaggtcactgaaacccctccctcttcactgggaggagctgaaggaaattaaagtacttcagtc

SEQ ID NO: 49614 - DNA, 283 bp, Mus musculus
  source 1..283: mol_type = other DNA
actgtttgcttatatgatatattatagggtaaggccttccctgcttaagtggggtgcgctcgtgagcacagctgtggtatcatctcagtaacttccatcccagttgccagttagcctaggcttcacggaaggagggccattggctctgactttgtaaagggctgagcaacttgacttcttcccttgctttctagttggcaagcacaagtcaactgttgatcaggtcactgaaacccctccctcttcactgggaggagctgaaggaaattaaagtacttcagtc

SEQ ID NO: 49615 - DNA, 302 bp, Mus musculus
  source 1..302: mol_type = other DNA
atactatgccacatggtggtgacataaaggacttcaggagcaggaagaatgagaatgtttcttcttcatggaggcttctgggcagcagagactacacagcctgtgccatgaaaaggatctagtaacagtttgctcagcagaacaagtctccaagcatttgatggtcatttgcctgctcataaaaaggaggggcatgggctctgagtggtgtcagaagcagcagctgctggacacgcaaaaattttatcccttttcaagatgccagctgggaggagctaagaaaaagtaaagtacttatttca

SEQ ID NO: 49616 - DNA, 183 bp, Mus musculus
  source 1..183: mol_type = other DNA
tttgcttagatgatatattataaggagggtctgggctctgcgccactacacccataccttctattagcagctgcagcaggacagccaaagctacacagagaaactttgtctagagcaagttgcctctttcctttgcttccttttcactgggaggggctgagagaaagtaaagtatttatttca

SEQ ID NO: 49617 - DNA, 240 bp, Mus musculus
  source 1..240: mol_type = other DNA
taacttagaagtcaaattatagttccctgctctaatatccatcagagaggggctttgtgccatctgtggactttagttccaacaatgtgctaacatctgacctttctgaatggcaagcacaagtcacctgtgaaatctagctgactaggtcaccatgatggtcagaaggaagtaagtactgaagcccctcccttggggaaagagtaaagtacttcagtccacatctgattaccttctggt

SEQ ID NO: 49618 - DNA, 331 bp, Mus musculus
  source 1..331: mol_type = other DNA
atttggctaattagtaaggtttgagttattacaataccatgccacatggtagtgacataaagcttatgtccttttaggaagaaatagcatgtggcttcttcatggtggcttctgggcagcagggacgatgctaatagcacctgcagccgtaaaggactaaaaaggagggccctgggctctgagctcatgaaaacacaagctacagcacttgcctttgaaactaggaaaaggctgagcaagttgcctctttcctttgctttctgagggcaagcacaagcaatcttgctgattgctaaatccacatgaggaaattaaagtacttacttcagtg

SEQ ID NO: 49619 - DNA, 303 bp, Mus musculus
  source 1..303: mol_type = other DNA
tcaatatttggctaattagtaaggttcttagttattagaatactatgccacatggtggtacagcagggacatcgaggtcattcatcctctggataattctgcattgtgccatgctgtctgtaacttcccagttacagttgtcagtcaccagagccagaggaagggctctgagccactgcaacccataccttctatttagaaaccaggtggtgagaaactttgtcaaggggttaagcaagttgcctccttcccttgctttctgaatgtaaagaggagctgagagaaagtaaaatacttatttca

SEQ ID NO: 49620 - DNA, 520 bp, Mus musculus
  source 1..520: mol_type = other DNA
agggcctaggtttgaacacgcccaaggtgtgaacctggtgtgatccttacacaggggccgagccccaaggctgggcgtctgaaccccacacctcggccaagcagagtgggaggatcctcccacgccgggtgctgctgcggcgggagcaggagccgaggccgggtagggcgacctgctgagtggcctccagccctgggcgccccccaccccgcgcgtctcccagctgtgcgaggcccccgccccggttccgccccgcccctcgcgcggggtccgcgtctgcggctgcgttccccgaaagacgaagctgcgccccggttccggtccgcagggagaccgaagggcatcgctccccgcgccgtgcccgccgctgagcccggagtgcggacaccccagggatgtgagtgcgccccccaccccgaggcccgcactccacgccccgattcgcggtgagcgccgaggcgcgcgcgcggggaccaggggaggggactcggcgcggggttcccggccccccagcccaggg

SEQ ID NO: 49621 - DNA, 398 bp, Mus musculus
  source 1..398: mol_type = other DNA
cttgtgaactactcaagtgctcacgctgtttgatcacctggtgacttccctgggcaggagtctataatgtgctgtttagatcaaagagaacagactatacgctcagactgactcagtgacagagggcctaggtttgaacacgcccaaggtgtgaacctggtgtgatccttacacaggggccgagccccaaggctgggcgtctgaaccccacacctcggccaagcagagtgggaggatcctcccacgccgggtgctgctgcggcgggagcaggagccgaggccgggtagggcgacctgctgagtggcctccagccctgggcgccccccaccccgcgcgtctcccagctgtgcgaggcccccgccccggttccgccccgcccctcgcgcggggtccgcgt

SEQ ID NO: 49622 - DNA, 390 bp, Mus musculus
  source 1..390: mol_type = other DNA
ccgcctgccttttcaagctgcggcatgatgaacaggggttcaaggaccatttactccagcctgtcaacctgagtgcaggctcaggcacagctgctctcaccccagtctgatggcaggctggctctgggctccacaatggagtggagtgcggagagaattgtgtatgaactaattctcacttgtgaactactcaagtgctcacgctgtttgatcacctggtgacttccctgggcaggagtctataatgtgctgtttagatcaaagagaacagactatacgctcagactgactcagtgacagagggcctaggtttgaacacgcccaaggtgtgaacctggtgtgatccttacacaggggccgagccccaaggctgggcgtctgaaccccaca

SEQ ID NO: 49623 - DNA, 339 bp, Mus musculus
  source 1..339: mol_type = other DNA
gtttgggggtctgctataccctgggagagacccaagggatccaagggctcacacagtgtacactggtgctgggagtttgccaggcagaagccagtcccagaaagctctctgtctctaagtcaacacctacctaggtgcaagggagctacctgtctagctgcagctggacagaccatgttctttccccaggacaagaccaggtggctcctgaggccaccactcaccttttgtagtccccaccagctcagaaacagctcaggtgaccagatccccggaggttctggagggaaatgactggtgggggccacaggaagcccccaggaatgtgcagactcagaa

SEQ ID NO: 49624 - DNA, 300 bp, Mus musculus
  source 1..300: mol_type = other DNA
tgataatccgccaagttgcacgctggacaattacatttatctattccaggacgacagagcaggggaccctggctttgccggaaaggaccgtgcactactgggtccgccatcccggcgtgccaccgaagctcgagtctcctagagccgacccgaaggggcggggagaggtaggcgggcctacggccgcagcacgggaagaggccgggcggctgctcctaggggctccggagcttgcggcggtaccaccgagaacccggcaagggtcctagagcggcgggtgcgcggcagcaccaccgagag

SEQ ID NO: 49625 - DNA, 374 bp, Mus musculus
  source 1..374: mol_type = other DNA
gtcacagaacagccttgactttgggctcaggaggtctgactgtcagctccagcgtctcagttgcaaacagggctccttttacctgctatgatcttggtccagcagggggcccactacaaggctgcctgctgctggctcggggagcagctgtccgcggatgcttggtacaaatgtcttgagatcttggtacacatgtcttcagatctgaggcttatggccctggtctcttggcggcgagcctaggcaacagcagtttttgcaggacttccagtgctgtgcagctggcgcaactgtgccatggggcaatgctcggccctggctggggacgccttcccaaggtgggcgggcagggcggcggagctctgtcagaaggg

SEQ ID NO: 49626 - DNA, 350 bp, Mus musculus
  source 1..350: mol_type = other DNA
agatctgactgagtcgctgactcagtcagggcaagagcagcttgacaaagggctagccacagtccaattcttaaaaccaattcgggttctggaaggcgatccggttctggaaataaccaggtcccggaggcggggaccgcagcggcgctttgcctcttagtgccgggaagaaagcaggcattgttttgtctctaacaaaccgtttaaaaaaccccattgtaagccttgaagtccctgcagaggctgcagcggctcttggtcagcgttgcgcatgcgtaccctgatcggcgagcggccctggttgctaagccatcgcaggcggggcccgcgctctgccgcaccggtcagtc

SEQ ID NO: 49627 - DNA, 430 bp, Mus musculus
  source 1..430: mol_type = other DNA
aacttcttccttagggcatttctgagagttccaggccagcctggtctacatagggaattccaggtagcgagattctgtctctaatgtaaacagtcattcgggttagctattataaataatgacatacaaatatgttagaatcggtgttttctacgcgttggttatacacctagacgtttcctactaaatgccctcaagaattttcttaacacctgtaatcatccgaaaaaaaaaattgcctccgattccttttcgctgttctcgtgctgctgcggcagcaaaggcgttaaaatggcatccctttgattccaggatgtttctctccagccagaaatacatcctgtctcaaacaaataaattgataaaaggaattcctgggccacttccgggggggcgacgtctcctccccgcctgcggggaccagtcgcgc

SEQ ID NO: 49628 - DNA, 644 bp, Mus musculus
  source 1..644: mol_type = other DNA
agcaactttgttgcgggcagctcgggagtcaccggtccccattctggagactccaggccacttgggcctgggacgagggcctcccctctgctgtgcagtcccatgcggcggccaccagggggccctgcccactcctcttgccgcaggtctggggctccgattggcccgggggcgtcggcccccacctggggaggcgggcccagaagcgcgtctctataaaggcttgtgcggctctgcgccgggccgagggaggcggggccggccggcagcgcgggtggggcgcggggcggggccgggcgggagagcccggagcgcggctgagcccggggcgcggcctctgcaccctccaggccaggaccgcggggattgggggccctgcgcccgctcgtagcgggccggggggccacccgagaggcctggccggcggcgtcccctgagcacagcccagagttgacagcaggaaacttttgctgctgcgcccttcggcggcgcgaccagagcctgagcccaccgcggcccgggggggagctagggggagagaggcccgcggctccccccacgctcccccgccgcccgtcggggcgcggccgggcgcggcggcggggctggggccccgggcgatggccgcggagctggcgatgggc

SEQ ID NO: 49629 - DNA, 298 bp, Mus musculus
  source 1..298: mol_type = other DNA
tgactctttaaaatgttaccatggaaactgctcccacacgtgggatataagtttttaaaatctcaagaggaaaatttaaactctacagcaaacattggtgtaggcatatctgtttgcaagatgacctcttgctttggatatgcacctacaagtccaattgctaggtcacctggtaactctacattcacccgtggatgtattctagagcagctctctcccggatcgcagggaattcccgaagcccaggcgggctccgctgttccgggagggagggctccttgaaagcaccgcgcccgct

SEQ ID NO: 49630 - DNA, 400 bp, Mus musculus
  source 1..400: mol_type = other DNA
agcattcaaatgcatgcgaccaccacatggtttgcttggaatacttcccctgcactggagcagtctgtcagactagttcatctagcttatacatacacactgcctacgcagacacagggaagacagtcgaccctactggggcttcctcagaaggatctaaaactgccctggacccctcccccaggcaagagggggatgggcagttggccatgatctccatggacactggtgggcagggccagactatgcagtggccatgtcccacttggctccagcagcctctctgtgattgaacagccaatcactggcacatgctcagactcgcatgtacctacgtctatgcccacgccacgcctgtctgtaggcccgcctgtgggcccgcccggggcctgattctagg

SEQ ID NO: 49631 - DNA, 304 bp, Mus musculus
  source 1..304: mol_type = other DNA
tccgggagggagggctccttgaaagcaccgcgcccgctaagccccaccagtttgaaggggccctagcagctagggtctaccctctatggaggtcacccactagtgggatgattccttgacccataagtctcaatcaggtcaggtagctcacagagctgtacatgagagccctggaggaaaccactgagccctggaacactggctttgctgtgcccagccttggccctcagccagggagagctttagcaattggccaaaggctatgcacagtaattaatgatgtagatagtatagacctactaca

SEQ ID NO: 49632 - DNA, 281 bp, Mus musculus
  source 1..281: mol_type = other DNA
gtgttgttcatcatggcccctagtcaccaggaaaaagttttagacttttcctgtgggacctgaacaagttaagaatattctggaagatggggctcatgcatgcatatctgcctgcagtacaaaaacacctacactttttttttttttttgagaataaattttgctgctgaaaggcagcactgacctctagggggctctcagcttcccatgacgctgcttgcagctgtaatgaagccctgattgctcctccctggtcaggggcaagaggccaggaagtacaa

SEQ ID NO: 49633 - DNA, 754 bp, Mus musculus
  source 1..754: mol_type = other DNA
cggatagcggcacaccgtgctggcgcaaggtgaggaaccacgagtagacggcgcggtcgatctcctcctcctggaaaccagcgcagcttgggctcgtccttgagccagccgcgcagagtgccgcctggcacgccgaagtcgcggcacacgctggcctgccgctcaccgcccttgacgcgctcgatggcttgcagcttggagtaggccttgcggaaagtcatcttcacggccacccggggccgcggcccgggcgctgggggcggcggcgggcgcgccgtggaacccgggccgggcgccggcgatcgcggcggctcagcaaggcaccgtggctgccgggtgcagggctgggccggccggagggctcgcggggtacatggcgtcggcgccagggaccacccgggaaagcgagcctgacaccccgcgcgggccgctcggggcggggctcgggggcggggctgcccgggtccctcccttttgtctcgccagccttgcctgccccggcccgcaaggcccgcccacttgcctcgtggcgcctgcgcacagtctggccttgggcgcgtagcgcgtccgccctcgtcggacggatccactcttcgagctgaggaggggttcggcgtgttgggagatccggttctccgctcctagcgacaactcttgaggtgaagcgcggccatggtggttcctgcatgcatcgtgatgcacgctctgagggcaagacagcgcgtgcccagggttggaccccccgccgtgcctt

SEQ ID NO: 49634 - DNA, 359 bp, Mus musculus
  source 1..359: mol_type = other DNA
cctggtggcagcagagacccacagcttggagctgtgtggacctggagcacatggtcccaaagccctgtcagtgaaggagagaggctgggtttctttcacagctaagggagcacctgtaggtgctagctcacctgtgggagcaggcagcttccatggtggtttctgcttgtctcttagataataggaacctgagagctacatatcaataccaatgccatctagacaagcagtttctaaaaggctgcccaagctgctgctgtcctaggaggccaaagcttgccagagagaggcatacctgtgccctggcacggaagggaactgggccggtcatgtcctgctgacagcgggtgatgtcacaa

SEQ ID NO: 49635 - DNA, 588 bp, Mus musculus
  source 1..588: mol_type = other DNA
caaatcagtaagtagagctagtcctgttactttaggtacgcccttggtgcttaaccgcaaagacctagggcgttagtgccgtgctggatgtgcggagccaccgcgcagccagcctgaagcagcgctccggcatgtggccagcggcccgcctccacacagggcccgcagcccgcgtgggaggcaaccctaacggcgcggggcccgggcactccaggcctccgccgcacgtgcgctccttgaggcggggcccccgcccgcgcaaggcacggcggggggtccaaccctgggcacgcgctgtcttgccctcagagcgtgcatcacgatgcatgcaggaaccaccatggccgcgcttcacctcaagagttgtcgctaggagcggagaaccggatctcccaacacgccgaacccctcctcagctcgaagagtggatccgtccgacgagggcggacgcgctacgcgcccaaggccagactgtgcgcaggcgccacgaggcaagtgggcgggccttgcgggccggggcaggcaaggctggcgagacaaaagggagggacccgggcagccccgcccccgagccccgccccgagcggc

SEQ ID NO: 49636 - DNA, 459 bp, Mus musculus
  source 1..459: mol_type = other DNA
tgttctagtttgcctaattatgcacattcaaaacaagacagcaacaaaccacctgtatgctggtggttgtttgaatcattttatttatttatttatttagttagttagttagttagttagttagacaggttgtagaccaggctggcctcaaacttgagctccacctgcctgggactgagaccaactttagctaaatgactatacatatagccagctaagtgactaaatgtcactatatgtggaattcaatacagataactattttggtgagacactaaagcactcaaaagttttttttaaattaaaaaataagtgctgtgtattagtgctgctttggcaagagcttggagtacccctctctctgtaagggttttggagagactctagctagcttcaggcttctcaggaggaattagacagcctgcttgaccaatggtttaccaaagcttgggggaaatg

SEQ ID NO: 49637 - DNA, 381 bp, Mus musculus
  source 1..381: mol_type = other DNA
atgctggcagctgaacttggtagcatagcagtttcagtggcagattttttaaaaacaggatataaaatatagagataaacccacacaattttttttttttttttgttataagatcaagatttccaggagaatataatgccctcttctgcctccatcagtgagtgagcttggcattcttgactttgcaaagttgtaaaatttactaaaagctctctaaagagcctgcctttcccagctcttccagggaagtcgcaaacagggctctcagccaccgcgtctgcgcactgggtcctccggctgaccgcaggaatctggcccggaagtctgtgacagggagacggccccggcccccattcttatcctagagtgcctacggatgtc

SEQ ID NO: 49638 - DNA, 523 bp, Mus musculus
  source 1..523: mol_type = other DNA
gtactcatatacataaaataaatagatttaaaaaaattaggaacaggctggcctcaaattcagagatctgcctgactctgcctaaaggtagagtgtgctctcccacactctgtgtgtgtatctatttttaaattaacactactatcacagttgatagacatataaacttagctaaactgaataatatttttgtggatccgagtggatcgaattctaaaaacaccattccaacattggctgatattttaatttttcattatgaaacacactttaagatgttgtcagaagagattttattcactgctttaaaatactcaatttaggtaaagaaatcgagtcttgtgtgaactcttggctggaacacacaactggctcagccaggcgcctggccactgaaatgattttccttgcaggatatagtcccttgagggacctgcgtttaaccacagcggtgagacgggaccatccccgccccgggcccgcgcctcactggcgcgtgggagggtctcgcccccctccactt

SEQ ID NO: 49639 - DNA, 383 bp, Mus musculus
  source 1..383: mol_type = other DNA
catccatctctactgcactgttcagcatcgtagcttccacatgatctggtctaggacaacttgagtcatcaaagtttataagtcttagcatgagcatgtccaagcttgatggtaatgtttcttgacagtgtgttgtaacaatattaattgtagcttgtctgctgataacttcacgtgaaagtggtgtcaacttggtaacatcagaggggaaaggacgtatcttcctttctagaattagaattacaaataagtttgcatctttcaaattaaatttggcatcacagtggcctaagggtccagtgaccccaattctgatttgaagccaacatggtctacaggaagggctgggcccctgggggcgggctcgcgcacacttccgccct

SEQ ID NO: 49640 - DNA, 334 bp, Mus musculus
  source 1..334: mol_type = other DNA
gcttaggtgacgctaagtcgctgagtcatggaatggtccttcactctcagtgactgccgtgggccaggcctccccagaagcatagggatcactctccctgtggccctgggtgtcacccagttttcttaaggaaactgaggcataggaacctgcaggatgcataaccggcatcttagcaagcccaggcttgcgcactgtgcggcctagagcctcaaagcgctgggctcgagagagcctggctggggctggcagctccaccccgcgcgtgcaggtggggctggctgcagaccccgcccattggcgcaggcgcaagggaggagcatcgcggctgctg

SEQ ID NO: 49641 - DNA, 374 bp, Mus musculus
  source 1..374: mol_type = other DNA
cacatgatctggtctaggacaacttgagtcatcaaagtttataagtcttagcatgagcatgtccaagcttgatggtaatgtttcttgacagtgtgttgtaacaatattaattgtagcttgtctgctgataacttcacgtgaaagtggtgtcaacttggtaacatcagaggggaaaggacgtatcttcctttctagaattagaattacaaataagtttgcatctttcaaattaaatttggcatcacagtggcctaagggtccagtgaccccaattctgatttgaagccaacatggtctacaggaagggctgggcccctgggggcgggctcgcgcacacttccgccctccgcgccactgcgcttgcgctgaagccg

SEQ ID NO: 49642 - DNA, 668 bp, Mus musculus
  source 1..668: mol_type = other DNA
agctttcaggttaggcactgcaaggcccaaaggtgttactgtgccaggtatcttatctgccgatccagtccagggatatgagatcaggaccccggttcatggcggctcggggagaggctccgggaaaggtacaggtcatgtcctgacaatagcactgttcagtctcctacttgccagcgtgaccctggaaaatcccggcccaggtccagagaccagacccaggtggcaccgcgcggaggcccgagcctcccgtcccgtgtgcctcgccccgccgtgctgtgcccggcccgctccggggcgggagccctacctggccaggtgagcggggtcggcacaggggcagcaggagcccaccgccgcccagcggcctcgcggtcccgtccgtccgacagccactccccgccgcggcccgcccgcccgttcggcctgattcacgcgcccgcccccgccccgcccgcgctctgcctcctgcctgtccgggcagcacctgggcggggcggccccaccccgacgcgcccgcattcctgcgccctccgcgccccggaccccggccgcgatcccgggttcccagtgtggcttcactggcgcccccccgacccctgagcgctctggtggagccccagagctgcgctccggaccctggccagcgccgctccggatttctagag

SEQ ID NO: 49643 - DNA, 269 bp, Mus musculus
  source 1..269: mol_type = other DNA
agtcatccagaagggaaggttggctccaccttgtgcccacaggtccctggcttccctgagaatctggcccacaggggcctcaagcacgctccctcggtgacctccctgaggggcctgggggtcaggccctgacagagtatgtggccacacgctggtagatggtaacagctgttcctgcctcaggtatacccctggggtggacatgtggagcctgagctatggagggtgagcatgtcccaacctcagcagcctgtctcacagcagctgct

SEQ ID NO: 49644 - DNA, 445 bp, Mus musculus
  source 1..445: mol_type = other DNA
ggtccagtacttgcaagcctcttttaatgtgcatgtattaagacccaggaccgacactgttggagcagtttttcccttgtgcctgaggggtcccatgggtacgggtgagtgcggtgagatgggtaccacagaggccagaagctccgcccctcgcgtcgagctggccaagccggaacttccgagttaccccaactctctagaaatccggagcggcgctggccagggtccggagcgcagctctggggctccaccagagcgctcaggggtcgggggggcgccagtgaagccacactgggaacccgggatcgcggccggggtccggggcgcggagggcgcaggaatgcgggcgcgtcggggtggggccgccccgcccaggtgctgcccggacaggcaggaggcagagcgcgggcggggcgggggcgggcgcgtgaatcaggccgaacgg

SEQ ID NO: 49645 - DNA, 329 bp, Mus musculus
  source 1..329: mol_type = other DNA
tcctacagtccagtgatggtacatggtggaccccaaggacatcgatgacgacatgcagaaatcatcgtcaagatttttgtggaattctccatggctcagagactcacaaggccatccaggccctcaatgggcgctgtgtccctgggaccaggcactctcacctcagcctgctgtgcaggggtgctcacgtggatagctctgagagctgtctggccctgagatctgtaggatccaggacgcgaggccggaaatcccgacatgccccgcgcgagaccgctacgggtcgtcggagacgccacgccgcgtggcccggcctaggcttcccggcg

SEQ ID NO: 49646 - DNA, 323 bp, Mus musculus
  source 1..323: mol_type = other DNA
ctatacgggcacgcacacatgtatacatgtaggcgtgcatgcttttgcatgtttgtgcgtacacacgtgtgcatatgtacactcatgcataccatgcaagggaggttctcacctgcaggggcctgggggttctcagagaaggaccctctctcggcttccctgaaggaaaggtagcacctgcaacttcagatggcatttatggggtatgagctaggcttgttaaaccccaggcctgggcatgtggaacacctgtctggagctctcagtcagctcctgggtgctgggcagggctgggccaggcaaaccagtctggccagtgaagc

SEQ ID NO: 49647 - DNA, 378 bp, Mus musculus
  source 1..378: mol_type = other DNA
gcttaagagtgagatgctaagctgggtctcagcgcttcgttcccaggaggagctaatctctatctgcacattttcggagaaggaaaatattctgccatgttttgctaaagatctctatattaaagtctgccttgcaggcagccttacggccacaaaattttctcactaggaaagagaccatatttcaaaatgaatgaggattcctgactttagatggacaatgcaaaggacgatgcatcagtctttttgtcttctgtctccgcagtctacgagctttcagcgagtggactctcgaccccccccccccccgaccaggggagggctctccgggtcgccactgcgtcgcgagatttccgcgtccgacgcccagatcgcgcg

SEQ ID NO: 49648 - DNA, 274 bp, Mus musculus
  source 1..274: mol_type = other DNA
cagggactcccaagtcacctctgtcagcaggagggaaggcctgggaccagcatggccacgggcaagcgagggcacaaatttcactccttggttagaatccgtagtccatgaatacacctagggtgccgaaattcattcctttggcctcctaacccaaagggagctcagccctgggaagtgagctccctgaaccaccacgtacaggaactgtgtggggaggggccagaaactccagctagaagcccctcccccacccacatgtctgaggatgggt

SEQ ID NO: 49649 - DNA, 390 bp, Mus musculus
  source 1..390: mol_type = other DNA
ctagggccagtagagggttaacccctcctgatctgctaaactagctaacccttctcaggataggtagaagcacagcaagctgcagcattctgagccagggtctctatatagaaaggtgagaaatgctccctcttcgtggttccattgcttcaagggagcccatagtggaactacctgaggagggaactggtcccatttctgagaccatatggtttgtctgctgggagaaccacagctgcctgggaaaccttggagaggcctccgcaggaatgctttgaggggcgcgtctcttgcctggggcggggttctgccgccctggatcgagctacagtccagcaccggcctgcagaggcggctccggaggggcggggcggctcctccctcgggtcc

SEQ ID NO: 49650 - DNA, 346 bp, Mus musculus
  source 1..346: mol_type = other DNA
tggctccactttctgaccacagggagtcagtgctcaggtcctccacgtttacaacctgtaacagctgctatccacccagctggggaggtggccctgcagcttgggctgggctgccctgctcctgtgggagatcctgccaaacccaggaggtccttcagcagggcctgctacaaaagcctagcagttgtagtgtacagtacccctgtgtggtagggtgatgttccctcgggtggccatggggatactggggcccccatcgctatacccaggttctaatgggggaggggctgccttcctcctttcccgcagggacactcccctctggggggcgggcaaggcgccttgc

SEQ ID NO: 49651 - DNA, 460 bp, Mus musculus
  source 1..460: mol_type = other DNA
ccacaaagcctgcctagtgacctccctgcccacagtgagtgtaggctatgttagcccttgggctgtagtccgaggaggccatgctcaccgcaggatctgggacagtccctggggattgggcagtcaccagggcttctggccagcgggactgccctcatgagatgcacctcaggcccggactctagcgggcctgccaggacttaacgtccagcagatgatcgccgggacgtgagtcagctgcagtccgtggcatccagcagaatgcacaggccctgggagtggcactcccacagataccagtcttagagtatcccagcgtgggaggaaccccggaaaactccagaccttttggcctagagggcacctgcatccgttccctcgagttcccgcgagctagtttgctcccgatgggctggggcgcggcttcctggcccacactgggcggggcgcttgctgcagg

SEQ ID NO: 49652 - DNA, 467 bp, Mus musculus
  source 1..467: mol_type = other DNA
gcccagctagatgggactccagggagcctgggctccatacgtcatgtactaagtctggacaagctgacaaggctggaaagctgtgccctcctccggcctcaccactgccgctgcaggcttgctgcctcagaggggcctgtgaccctccccacgcgtcttttgggaacccagctaggctggaggccatcagtcctgcgttcaaggcctcacattggaccttggggcttgtgaggagcccacccgcctgggcattgacatctgtccaccctctgtgcttggtggctgttcccagagggcacccttggagcattcaggcctcctcctgatgtggacccgtgtggagtctgcccaggctaggatggggggctgaggcttgggggggaagagctacaggcccctcctcctggcgggtgttaaggctccagttaaccttgagcgtcggtggctctgcgtagagacagctgagc

SEQ ID NO: 49653 - DNA, 428 bp, Mus musculus
  source 1..428: mol_type = other DNA
cgagacactctaggatgtagtggagaggacccatgggcctggcccagtgccatcaggctcctgggaggaaggagatggaatcgtgtctccctctccacacagatgtacacatacatgcagcttgtttcttaggaagcaggtccaggtccgacactgtgcctccacagactaggaatgcagggagccttgggatttccccattctgtaattcttggggtaccggtagtctgaccttggagacacagtcctgtctgccctggcacagagctctctgggagactctttggcccatgtggcattttccaagagcaccccagaaggcagggtatgggcagcaccctctccgcccagctagatgggactccagggagcctgggctccatacgtcatgtactaagtctggacaagctgacaaggctggaaagctg

SEQ ID NO: 49654 - DNA, 419 bp, Mus musculus
  source 1..419: mol_type = other DNA
ccttagggcatgagctcagagtggacactcaggctgcctgtggtgactttgattccctatggcagctgggagtccctggcgtccaacagctgcactgaggcctcacccagagctctcttcagtgagaggggcacagtactgtccctttcctctgatggacagcggcagtggtgcctgccgccaactgtccctcacctcaccctgagatcacagtgagggggtgctgtccttatgaggaccctcctgagaaccttgaacaagtgttttagaaacacatgtaatggcagtttattggtgccccccactcttcaaggggcccccgccagtagtgggtgggagggaccggccctgctgctgagtcagagggggccggcccaggcgtcctggagggcgggcaggcgggaggctcagacaggcag

SEQ ID NO: 49655 - DNA, 412 bp, Mus musculus
  source 1..412: mol_type = other DNA
agaggtgccctctacccctcactgcccagcacagaggacctagggtcccatggcttgcaacagtccacatgttcacttgtctccttcttcccatatggacatcctgtctaggaggcaggcagttgctaacaggcatgtcatgctgggtggcattcaaatggtgaccccaaccacagggtcagtgggtgctgggagacagacagagcatgcaagtaccgtctggctggagaaaggctgggtcactgaagcatcttgagcctaggagcatgggatgaccaactctgcgtcagctgaggcttcagtatgacagacaggctctgtgcaggtacaacctgcaggccatgcatatggccctcaggtggcagaggccctggcaccagtgtccgggacattgatcagcagaagcctcagg

SEQ ID NO: 49656 - DNA, 338 bp, Mus musculus
  source 1..338: mol_type = other DNA
ctccaggaacttatctgagagcatgtgcaggacacacacacacaattgatgatttataaaatgggttactacctcagacctttaaagacaggggtgagggttgtttaattacgaagatattttccctcactccggtggccaggtgaagtggcccggggcaaacggccaccttagaccgagtcctgtcagccgcctctggttcccgagtgcttcccgcgaaggggcgcgccaggcagcgcgtccagctacggggcaggtcgcctgctggctggcccggccccgccccgcccgtggggcatcctgggtgcggggcggggcgggggaggcctcaagccgtg

SEQ ID NO: 49657 - DNA, 326 bp, Mus musculus
  source 1..326: mol_type = other DNA
gaaggcacctcctcgctgtggactgccttcagagctgcccacgggagcactcctgtctttggctgccttggcctgctcgaccgccaggggtcagcagaacacggcaggcccgtcttggagtgggggccacccacgtggcagtggatccaggcgtctggacgcggtgcactcaccgcccaccaaggtgtgcgcactcggtgagtgccgccgggtccagtactcttggcacgtagcccggtcacgcgcgcccgggcagcgcagctcttggtgggaccggggcggggctctggattagccccgcctgcgctgcctccgcggttctcctg

SEQ ID NO: 49658 - DNA, 439 bp, Mus musculus
  source 1..439: mol_type = other DNA
catctatctattgttttttagacaggatttctctgtgtagatctatctatctatctatctatctatctatctctgtatagccctggctgttccggaactccctctgtagaccaggctggcccttgctaagcgcctcctaaaaggccagttagcatttctttaaaagctctgtttgaaagctctgagccttctagtgctgagaggcaatacaggtggggtctacccacctgcagggctccctggaggagttaggccttcctggaagctagccctcccgtgtcactcgtcccatggagacagtcactgtatttctctagacagagccatggtgagctttcaagttttcatgtaaatcctaaattcgctgagttcacctcaactaccatgtacttggcaggtagaacgcgtgtcacacccattgctgcagcaacagtaccag

SEQ ID NO: 49659 - DNA, 464 bp, Mus musculus
  source 1..464: mol_type = other DNA
acagaagaatcctttctagttcaaaaccagtccggcctgcacactgagtttcaggcagtctgggctaccgagtgatacccggtatcaataataataataataataataataataataataataatggcaaagctcttctgtggaaggatgaacagcagaaatgtgttatgatctgagcattaggcttttaatttatgcgtgcacccgccatgctgtggcacacacatggaagacagacaacttggttctctatcatatggaactgctcacccttagcatttagaattcggtttctaagagccggacccagccaggggccagcctctaagatcagcgctgctcatgtctgggacccagggcacagaagcctagagattgtatctcaagcatcggtctaccccactagctaagaggctagtgggtggttcggcagaaaggggagaggaagttcctgaactacttac

SEQ ID NO: 49660 - DNA, 252 bp, Mus musculus
  source 1..252: mol_type = other DNA
ccaagggaaaatttcctcaagagtgaagcagggagacaattaaacgattaagtctcttgatctcaggctggactgcctgagaggactctccaagagtccttggaggcttcagtaaatcctggatttaggaatcgatattgaattcatcaatagagatcagaaagcgcagggcttcaggactctgacttaggacgcctacagacaatagcagactgcctaggcaagctggaccaagcagtttctgtaggccag

SEQ ID NO: 49661 - DNA, 295 bp, Mus musculus
  source 1..295: mol_type = other DNA
gcgcacaggcctgcattcagtaccagccctgtgctagccgctagcgctggccccttcaagctgaggacggggagagccagggcacacccccacacctctttagccactgcgctgtgcctctagactcttcgttgctgagctctggtcgagctagaggagccccttccaaggggtccatgtcccatgaaaagagtttcttggtgtctggggacagcccccaaaacattgtggggccccggggcctatccacagggtggttaccctcaagggccctaccctcaaggaggctacccac

SEQ ID NO: 49662 - DNA, 276 bp, Mus musculus
  source 1..276: mol_type = other DNA
ggcattctttctagaaagctcggaggactcagtcctccggctcttgatgaacactgctcccccgggagagagttgtcttctacttgcttggccagccagataagccaagtcaacgtattttagattcttgagagaatgaaactccagaagattcagactctcagccagtgaaggcagaataatgaatattcattgatgagtatccagtcaacaccagaccttgtcaagacattgagaggagggcataggctctgacctcacgagcctactagacca

SEQ ID NO: 49663 - DNA, 204 bp, Mus musculus
  source 1..204: mol_type = other DNA
tggttcctggcaagccggcgacactcacagcgtcagaccaggcagatctctgtgagttcgaggccagcctggtctaagaacttaagtctgttaaagtctcagcctctgcaagccatcggtgctgagtctctgcccctaagtttttctccgaagcactaagtggaacagaagttctgagtgggtggggccagtggccagcactca

SEQ ID NO: 49664 - DNA, 217 bp, Mus musculus
  source 1..217: mol_type = other DNA
tggataagagcactgactgctcttccaaagacttctggtttctgaagacagctacagtgtacttagatataacaataactatacagatgcatatatacaactgcaggccctttgtgtttgtattcaatgcttagagacgtccggaagccagtcttcttggcgtacctaggccttccgtttcccggaactgaaaggctgtcctgaaggtccaggtcga

SEQ ID NO: 49665 - DNA, 352 bp, Mus musculus
  source 1..352: mol_type = other DNA
atcccagcacttgggaggcaggcagatttctgagttcgaggccagcctggtctacaaaatgagtccaggacagccagggctacctcagggggaacaccagttccaaatgtctgttggtgtcactacaggagagaacagtctgactacatcagaaatgttgttacattagggcaattccgaggtgcccttgagccaaagcgctgggtccgcccctgctggcaagggccactcagtctcgctctgggcgagccggcccgcaattacgtaatccggagggccaggcacgccaggcttgtgtgtggtgtgtttctccaggccccaccccgaggtgggggcagggccttcgggaagc

SEQ ID NO: 49666 - DNA, 299 bp, Mus musculus
  source 1..299: mol_type = other DNA
ttaaccacagttcaaaccgcaaactcaagttggaatcagcttacaaattggagtccatcattaagagatgacattatgacgtaacggcaaaattagctattcagaatcagccaaataattttatgtttgaggatcatcacaactcagaatgttaagacccactgtgccagtgagcccactcaggcacactgtcgctgctctgtcgtgagatccgccagcgtcccgccttccagctgctcgcccgcattttgagcacgcgcagagctggcgacctcagttgtgagccatagtggggcagc

SEQ ID NO: 49667 - DNA, 265 bp, Mus musculus
  source 1..265: mol_type = other DNA
ctgggattaaaggcttgatgaaaaagttcacccatatgggtgtgcagctggtagacatagagtgtctgacagctacagtgtcagtgtcaatgcttagatatgctctcattaagaaaattgaattatggactttatatgagggtttccagtggctcaactggagattgtaattagagttgcggccaggctcaacccggactagaggagccgggcaagggacagtcctggtccactgatggacagcgtggtctgagctctcgtcggc

SEQ ID NO: 49668 - DNA, 289 bp, Mus musculus
  source 1..289: mol_type = other DNA
ccagaattgggctagatcaagccaccgaggtgacggcggcgcgggctttgcgcagcgcgggttcctcaggactggagggcggcgccgcggcctccactcgggccgcactgtatccgggggaagaagcttcgcggcgacgtcccgttactccaggccctgccggcccatacgggctgcagccgcgtggtggactccagaaccggtgaccggtctgtgacactgtctcggccatcaggctctggtagtgctccggaaccgaggctcacagtccgagtttctggcctcggag

SEQ ID NO: 49669 - DNA, 452 bp, Mus musculus
  source 1..452: mol_type = other DNA
aagccttgagggtcaccctgcttcctgtcaagaggaggaaacccatgaatgcaagtatgcctaattcgtacttcgtacgtcgaagtgtgtaggatgggcagacacaccacctctgctggcgcaggccagtggtctcctggcattgctgccctgcaagcctagaggtaccagatgaggcactgcagcagcgcgaggcccgccggggactgtggttcccgcaagcccggaccgcttggcgcacaaggcggacccacctgccagaattgggctagatcaagccaccgaggtgacggcggcgcgggctttgcgcagcgcgggttcctcaggactggagggcggcgccgcggcctccactcgggccgcactgtatccgggggaagaagcttcgcggcgacgtcccgttactccaggccctgccggcccatacgggctgcagccgcgtggtggactcc

SEQ ID NO: 49670 - DNA, 247 bp, Mus musculus
  source 1..247: mol_type = other DNA
actagctgctgtcaacagctgggaaatctggacagttgaggttgcataggatctggaaccgtggcggttcctggctctagctaagtcccatctgtgcgctggcaggggcgtctgtcttgactcagacttctcggttcctggatgtctgaaaccaggtttaaaaggtggcagcaaacctctggacaccaggatcaccggctgccgagctttctgcaccagcttaaggggtgcctaatactgtggccca

SEQ ID NO: 49671 - DNA, 357 bp, Mus musculus
  source 1..357: mol_type = other DNA
tcacaagatttgtaaattaggtatcagcattattcccacttttacccgccccaggctcggtgcctaacagtcctagccggaagcgtccaggccgctcagggtcttccgcggctgcgcttcggcatcctgtccagcgcccaggggcctgaccgccgcgtgcactgccaggagcaccacaggtgaggcagggtctgcagccactgccgcaccgccggcgggcggcgacatttctgatccggcggagtcctgactctccgaggccagaaactcggactgtgagcctcggttccggagcactaccagagcctgatggccgagacagtgtcacagaccggtcaccggttctggagtccacca

SEQ ID NO: 49672 - DNA, 351 bp, Mus musculus
  source 1..351: mol_type = other DNA
taccctctgaaaagttctcaaaattccaagttcagaaattacctgaatcatgatcagctgctgtggacgtatgtaagggaacaaaaattctagaattctcaaaaatgtcattacatcaaagggaggatcctggacccttgccactagtggccttgggtcctcctcaaagaatgaaacggcggctcatctcttgactcttgaaatccttagaagactcaaccctcctagcttctttaaagatcttcagcaattaagaacacattttgttctttcaggaggtcaggtggctcacatccatctgtcaccccagctccagggggtgcaaacctttctattcaccttctattctag

SEQ ID NO: 49673 - DNA, 305 bp, Mus musculus
  source 1..305: mol_type = other DNA
acacacatctgggtgcaccaaacccaaagtttatctttagctgctcctggagctggatagctaggacatgatcatcttgatggacatgtactgggcatggccatatgagtctagaactcactatgtagaccaggatggcctcgaattcataagcccgccggagttctgcagagaacagcgcttgcgcagacggcgtctggcgcagcagcagggtcaccggaccgctggggtacccagcacctaggccggggccaaattgccgcgcgccaggccgcagttggccagagggctgcgggtgctccgcc

SEQ ID NO: 49674 - DNA, 279 bp, Mus musculus
  source 1..279: mol_type = other DNA
tcaccactttatattatttttaaatattaatatttattatttactaatatgtgtgtgcgtatatgtctgtatgccatacatattatagccgttctaaaaggttggaggggtagttgtacttccaagagggacattaactaattaatttgattctttaagacagggtttcttgtgtgtatgtacacatttcaggtgaaggctctggatcctctagagctggagttccctgagcagcaagtgctctcgaccatatagccctggctgtcaccaggttggcct

SEQ ID NO: 49675 - DNA, 217 bp, Mus musculus
  source 1..217: mol_type = other DNA
cccagcctggggactgctgcccaggcggccacttcctgcaacagtagccacatgagtgccagcagcccctcagcaagaccccttgcttagctcttatccacgtgtgcaatgggggtggggcccccaagctctctctctctctctctcacatacacacacacactggccaggcactcagggccagttgtcttggggcactagtagcaccccagaaacg

SEQ ID NO: 49676 - DNA, 638 bp, Mus musculus
  source 1..638: mol_type = other DNA
gccagccagagatgcagggccagcagggtgtgcggtgtacacagtccgctgccaggcacagggttccacggcccttggagggccgggcctgagcttaggcacttattctgaatgattgcctaaaaagcactctccgtgagtggctctgggggcggggcgcacttcctccccagacagcggcgtcctccctctaggatgccaggatggctgaacccgggcgagcccgactaactcgcaggccgctttctccgaagcaggtcccctcccgccacaggaccctccctcgaaggccgctccggcccatgccagctcctaccgggctccagcagatgagcgcgtctgtgtccgggtcgctcacgagggtccggaaggccgggacgttgctgggccccgctgcaccggggcccacggccagatccagtgtcgtcgctgcccctgccgtccgggccgctccgccgcccgctgcgcacacacagcaaggcctcgcatggccgcagccatcttgcgaccggcgcgctctcgctagggccagaccctctgtgcgcaggcgcgccggcccagcccttgcgccgcaccctacgcctgcgcaaccaatcagagcctggtagggcggagcctggctgggggcacacgaggcg

SEQ ID NO: 49677 - DNA, 441 bp, Mus musculus
  source 1..441: mol_type = other DNA
aaagttgagaactttctaccacctacatttgatgaatgtagcaagcctactgagcttagcaacatggactagcaatggttccatgacaaccagttctggatgccccttttgattcacaacacacctgacatgctggcttggtagcaggtgaggggactcttaaaggtctctcccttacaggccacggcccggcctccctggtcttgccaagtgcctgcattcccagagggatgccaaacgtcgtttccccggcagcgatgccggtgacatgtggcacacgcccccgccatgctgcgccgcgccggctaccgatctactgccgcttccggcagcgggagcgcctcgtgtgcccccagccaggctccgccctaccaggctctgattggttgcgcaggcgtagggtgcggcgcaagggctgggccggcgcgcctgcgcacagag

SEQ ID NO: 49678 - DNA, 227 bp, Mus musculus
  source 1..227: mol_type = other DNA
gggatatgagacatggctgagcccagggaagaaggtcagtggggctgctgcccagcaagctgtgagctatccagacaacctgaccgaggtgataaggttcagggttgtgtggtccctctcctttgcagtggatgtccctactatccagaactccatgaagcccttcaaggtgatagggtagatggcatagctagctgaggcagcctatctccacatgagcgtctctt

SEQ ID NO: 49679 - DNA, 236 bp, Mus musculus
  source 1..236: mol_type = other DNA
agcagatgggtcagcaccagtcggcccagcggaggtgctgttctctaactattctagagaaaaaaagagtcaagctttttcacctgaccaagtcttggcgcggctaaaccagactggatgacttcaggcagccggccaggggcgtggggccggagcagcccgcccagccccgggagcacgcctagactgcggcggaagtcccacccccggaaggagtgagctaaggggccacgccc

SEQ ID NO: 49680 - DNA, 417 bp, Mus musculus
  source 1..417: mol_type = other DNA
taggagaggctacctcttaggcctgctattccccagaagagttgtcgggccctcgacagcactgtggggcggtaactgggcagttgcacacatttgctgtaatgcgaagctgggtatctggtccctagcagctagggatctgttgtgcgctcaaaaatgtttgatagctgccagggagccaggagccggggcagttctcctcccgcttgctcccagctcccggtgccttcaactcccaggaggctccagtgctgcgtcaggctccgcctcctcggcctcggactacaaatggactcacgccacagccagtcagctgctccgcagcatcgcagcctcagcgtcgcagaggtagtcgtgcgctgcgccggctacggaggccggcagggggcggcggcggaggccgttgctcagggtcca

SEQ ID NO: 49681 - DNA, 560 bp, Mus musculus
  source 1..560: mol_type = other DNA
gccactccaggcaagcaaggagcttcttctctcccttaaggttgcccttgccagcccggccaaccagcgagggtgacagggtagcggtcttaaagcctgctctcagtgctaggctttgagctctaagtgacaggccgctcagtgcgccagtctctaccgcggcaggcgctgttggtgtacccagagtccaggccctgatcgagcgacggctccggtcggggtttggtcctgggcttggcgacagccgtggggccacgagccagtgacctcggagcgcggcgacgggcgcgccggtgcgcacgagcgcggggaggctccaggtccggcagcacgagcaacatgctgtccgcttgcagcaggtggtacccagagccgcgaggtgccaggcggtcccaccaccagtcctccgccgagcggccccgcgcatcgggccgcttggagcttcgaactcgacgtctaactcgcctagaggccacgggagccatagcccccggcagagaggaaggggcgtggccccttagctcactccttccgggggtgggacttccgccgcagtctag

SEQ ID NO: 49682 - DNA, 342 bp, Mus musculus
  source 1..342: mol_type = other DNA
acctcaaagaacccaatggtcaacattaggacagtttcaggggagttctgaggaaccaggtagtaaggacccctccaagaaagcgagggtgtctctagctttggtggctgtctcaacaggtgttgccaaactagcgaatactgagagttggaaaatgaccaagtgtcagctttgagttacactgtcacttttcagccaagttcctgcttggtaaagactcatcacttggtgtctcccatgaggctatgccccgggcgacctcaaggggccgctgcacgccgaggcggtcacgtcacgttttgggggcgtggcccttccactctacccaggtctgtgtggcgc

SEQ ID NO: 49683 - DNA, 497 bp, Mus musculus
  source 1..497: mol_type = other DNA
tttttttaagaaaagttttctctgtataaccatggctgtcctggaactcactttgtagaccaggctggcctcaaactcagtgttgggattaaaggcttccaacaaaatactttttaaaagagatctttttttttaaattttattttatttttaactggggcatataaagtttgcaagtccaatgggcctctctttgcagtgatggccaactaggccacctgatctaccacatcactccaagcctatatacccttgttttattctagaggtccagcaccctccagccctggctgtcctggaactcactctgtagaccaggctggccttgaaggcatgtgccaccacgcttgctcccgctcttcgctcgcagccacggcgcgcaggcgcagatgcgaagcggcccggaaccctgcttctcaaccacctggtcctcttagaaggcggtccgggcaggaagcgcaggcgcagtacttcggaacccggtggctgggttggcg

SEQ ID NO: 49684 - DNA, 430 bp, Mus musculus
  source 1..430: mol_type = other DNA
accccagacacagtgcctctggggctacccaaagccctcttccagaaggccaaaatgccttgtgacccgggaattgtcagttcctggagattgggggaggggcacagctgggggccccagccctacctcctgaccaggggattttccccgaggggccttagctcaggagccagtctaagctgcttggtgtcaaatagaacgcccatgtttgacttgataacatcgcttctggtccagtggcaaggtaacaggcgagggtgagacagaggaagccctgactggcagttcagggtgtggctccagccccaggaggcaccagctctttctccccaggctttcggggaggatctgccactggaatggctaacccagcagccaatcacagagccctgtaggaaatatctgggagaggtcttggagctagggccaa

SEQ ID NO: 49685 - DNA, 250 bp, Mus musculus
  source 1..250: mol_type = other DNA
ggggctggcctgccactgccttgcccagctgagaagggtggcagccagagcacaggggagtccctgggtttatcaaggcctggcatgcccacagtatacagatatattgagtccgggtgtgtaagttaaacctacctgaactctgacctctgggacaagatcttcgtgcagttgcaggagttgcccgagactcggtgtgtcagagactgccagaccagaagaaaaagaaaaaccttactgcggtactcca

SEQ ID NO: 49686 - DNA, 397 bp, Mus musculus
  source 1..397: mol_type = other DNA
aaccaataaataaataaataaataaataaatctttaaaaataataatgtctatctactgcagaggacctaagtttggtaactaacatccacacgatgattcaacacacacacacacatatatatatataggtaaacacatacgtgaaatttaaaaaatctttttttcttaaagattcatttatttactatatccaagtacactgtagctgtcttcagacacacacacatcagatctcatcacgggtggttgtagccaccatgtggttgcttggacctgaagacaattaccaggatggcctcaaatttagaaattttggtaactcaccagaaagggcacttcctgcttgggtgcccttctgccacctgatggcgccagtaggactacaaatcccagaa

SEQ ID NO: 49687 - DNA, 322 bp, Mus musculus
  source 1..322: mol_type = other DNA
ggacacagtaaatttgcatatatccttggtggtgggcgattcccagaaattgcttctttctccaactctgaggttgggacgaaagaggtgggtgtcagctaggccagagccttgcacaagcccgaatttctgtacacatccccccccaccccccgcgcgcgagcgcgacatgggaggcttagggaggagtctgaagtctgggggcctctccagacccctcaccttcgagggtgggtgggctcgtccattggaggtggccgccgcgtcgtcttggccctcgcggcgcttccattggcttgcgcgaggcccacgtgatcaggag

SEQ ID NO: 49688 - DNA, 300 bp, Mus musculus
  source 1..300: mol_type = other DNA
ctcaaaagcttttagtgctcatgaatcctctgccatcagcgctctaatcagaccctcaatgcaaagctgccaattagatggccatgcctatatgggcacctacaacatactcatggtccagaaggagggcttctctgtatagccctggctgtcctggaactcactttgtagaccaggctggcctcaaacttagtccttctaggttttagggtatgcccagacacccaaaggcaacctgggagtggagattgatttcgggggccaccaaaagtccctactggaatctttcatcagaatgat

SEQ ID NO: 49689 - DNA, 358 bp, Mus musculus
  source 1..358: mol_type = other DNA
tgggggcgcggggcggcagagagcacctcttcgcgccgccccgcgtccccgcaccaggtctctgcacccgcccgccgcagtgcccatgcgcatgctcgcggcggtcgcccccacggacgatcttccacgggcggagggccctcactgaggggttgtacttaaggccctatcaagcggtttttagtcccgggagccggacccagcccggccacccggggcgcttcgcaatgccgtgccgaagatcatgggctgtgacgcatgccttttgaggccagcctggtctatacaggaagttccaggacagccagcggagcgtaagccggctgctccaatccgcgcctcgggagggcgggctagg

SEQ ID NO: 49690 - DNA, 350 bp, Mus musculus
  source 1..350: mol_type = other DNA
aaaagcagccacttttaagtaggaaagagttactgttaaggagtcccagcctcccatgggaggagcatcatcctctttctagtggacccagcactcagggggcagaggcaggtgagttcgaggccaccctggtctacaaagtgagttccaggacagccagggctatacagagaaaccctgcatgcagggacacccctgccaataccaggtgggacaggacagtgctccattcagtcctgggtgtggagctcttcaggaacctcgagttcctggcgcccaagcgtggtatcagcggactcaaaaggccttccctagcccgccctcccgaggcgcggattggagcagccggc

SEQ ID NO: 49691 - DNA, 210 bp, Mus musculus
  source 1..210: mol_type = other DNA
attagagcgctgatggcagaggattcatgagcactaaaagcttttgagctggcagtgggacttcacttcctctgaagaagaagcctggctccttgaactgctaccctttaatcaaaggataccccgcccctgtcaatctacagtggatgagcaccgcggcttccgctcgggacacctcgggccggaagtgtcgcgttgccatggcgagga

SEQ ID NO: 49692 - DNA, 327 bp, Mus musculus
  source 1..327: mol_type = other DNA
caggcctctccctaaggtcactagattcaggtccttgtgtgaaacagacgagtgtcacacacatgggtgtcccagagcccttgcacatctgcctgaagccagactacaggttggctctagcagctgctgcatgaaggccctgaggctgctgtccgatgggaatatgccctacgacctgtgtgagcaagggctggtgccctaggtcatgccttctctgagccaccttgcctctcaggtatcacccaggagggcattgaggaggcccgggcagtgccagagctgtgcatgctgaatgacctccagaaccgcctgcaagcaacctcagtg

SEQ ID NO: 49693 - DNA, 297 bp, Mus musculus
  source 1..297: mol_type = other DNA
ggctactgtggcagagggattaaggctcacctcatgccttcctagctgccagccatgaaagtctataagctttctagaaggccagtgggagtggggccttcaagttacccttggcctgggttgtcgacctaagggcaaggcctggcttagttacctaggagacaagtaggcctgggtctcttgctccctcgtggggacactaggcggcactgggcctcgccccaagccccgcctgctgctggcaccctggggcagatctgtgcccagcctgatggggcggggcccagggtgctcctt

SEQ ID NO: 49694 - DNA, 290 bp, Mus musculus
  source 1..290: mol_type = other DNA
gatcctgagactatctggaagtggcaggatagcccctccgtggaagcaaggcagtgccagggtgctaggacttggacactgtgtccaaacacaaataattgagtcagttaacccaaggcctcatttaacacattctgtggtcactgacctgggggcagctctgaagccacagcgccactgagtttgtcggattcagcagaactttgagaccagcctgtccgctggcattgtgagcagcaggctgtcgtgtgactagtagggggttggctccacccccagcccgggttgcc

SEQ ID NO: 49695 - DNA, 419 bp, Mus musculus
  source 1..419: mol_type = other DNA
ctgagcctgaatgattcttgctatcctgggtcagttcgcctaggccttacgcgcccaggggagtccttaaggcacgcgtccctggggaaccccgcgtgactggcagcccgcctggcctccaagcaaggattgcttctgacacaggacacagcggtctctgcggcatacagccgggcgagcctggagccacaggccgagaccggcctcgcccgcccctagcggcccatccccgcgcgccggcggcacctcccgagaatccgcctcagccgtgaaggcctgcaacccttcctcgcccagcaagcctcgcccagctccgcgcagcgccggggcgcgctgtgatgacgcaacaactcataggcccgccccctccccggggggctcagagcatctgcagcaccgcccggcggccgctctcattg

SEQ ID NO: 49696 - DNA, 334 bp, Mus musculus
  source 1..334: mol_type = other DNA
acagaactcagtaggctctgttttggcatagactactcaggtggggaccccagcagcttggctcctgtctgtcgtcagcctgacgcaccgcctgctttagtcggcggtcaggggcatacccactaacattcgcctaggagagaagcttgtcagcaacaggctgcgccaggatccttcgctggccgtcgcccgtgcagccgtgcaaaagcgcgttcccactcctgtagccgcgcgcgaacggtcgcgagccgccaatgagagcggccgccgggcggtgctgcagatgctctgagccccccggggagggggcgggcctatgagttgttgcgtcatc

SEQ ID NO: 49697 - DNA, 578 bp, Mus musculus
  source 1..578: mol_type = other DNA
agggcctcggctccccgactctgagggaaggcaccatccacgagggggggccgctgtctcgtgccagtgctggtattcccaggaaaaggagcggggaagctgggtcaccgagcatgatcgtgccctctcgctttgcggcagagagcgtaactctgcgctgtgaagaccggccagtggtctcacctcgtctctcctactgtggcggtggcgaggcgctggcgatacccttcgagccggctcgcttgctacccctggcggccaatgggcgcctgtaccacccggccccggagcgcgcaggcggtgtgggtctagtgcgctcggccctggccttcgagctcagcgaaggtcgccgcatcgcccatctggccccgctgctgcccgctgccccgccgccctgagactccagctggggctgtgtggggagggcaaactctgggttttgtagtaccgctgtcacctgcacgctggtgactgagagcgcgtgcgcgcagaggtgaggattggcctgcgctggtcacgtcaggcagggcggcaggcgcaaggcgcgcgtgggccggtgcgcgtgcgcgcccacccca

SEQ ID NO: 49698 - DNA, 540 bp, Mus musculus
  source 1..540: mol_type = other DNA
gcaggtaccggctcgccctgccagtcgcaagccagccccgagaagtgccttctgtttcccggagccgagcgacactgccctcctggtcggctgaagcgttgctcagggcaacaggacctcctcccaccctagtctaggggcctctggctggggccagaaggagtgctggccactactaggactctccgtcggctctaatggggaggccccaaaccaaagccctctgggttagggccagggctaggacttgtgtataaagatataaatagaacgacagaactaagtttgctaaggacatagtttttccacacacgggcggcgcgtggatgaggaatctgagttccaacagttgtcaaatttctcctgtttatatatatatatttttagagtttttatttattaaaaacaaaagtcccgtcatgcggaggtcctggcctctctctccagggcctctcggccgcaggcgctccctcgtacgtgactccgggggcgggatagacagctccgcccctccgagcacgtgttgccggcggaacccaa

SEQ ID NO: 49699 - DNA, 283 bp, Mus musculus
  source 1..283: mol_type = other DNA
gggtttcacctcctcagctctgaaattctctctcttaaaaaaaattaataagaagccactggcacgtgcgtgcacttaggaagacacacctgaggtgacccagacctccagaagtggccggctagcgcggcatcgggggcggggcctccgacagaggcaaggctccctcggagctcccgaggggctgcgcggtggcgcaggcgcattgcagcctcgcgggcggcgccccctggcggcgccaccatcctcgcgggggcggagtcggaggcggggttggtgacgg

SEQ ID NO: 49700 - DNA, 524 bp, Mus musculus
  source 1..524: mol_type = other DNA
cagcagtttttttccaaaaaaaaaaaaaaaaattgtttgaaaaataaacaaagcctttgtttctatttggcctaaatgcccacaggtacaattgagattacatcaagactaattttctaacaacttccacatcttttaaaaacattatattatggcaataaattttagggctgaagaaatggctcagcacttaacagtatgtgcagtcaaattatttatccttggttttaaacaatatttcatagcccaggctgtgctgaaactcagtatgcaggctagatgcacctgtcttgcaatacatttcacgggccccaagctctgggaaacaaccagccggggtgttagttacttaaccagtacagatcttagctggttgaaccagagaggagacctgccagtgactggcagcatcctggcgagcatctctgagccccgcccagtccgtgcgtaggggcgccgttctcggagaccctaaagaagctccggaagtgcgcggcgaccgtggccgcgcgtgcgcagcgtag

SEQ ID NO: 49701 - DNA, 382 bp, Mus musculus
  source 1..382: mol_type = other DNA
caggaaaaaaatcaggtttattcagtagctggcattctttttttgggtttctctgtgtagccctggctgtcctggaactcactctgtagaccaggctggcctcgtgccaccactgccgggaggtttctctgtgtagccctggctgtcctggaattcactttgtagaccaggctggcctcaagccctggctgtcctggaactcactttgtagaccaggctggccttatcattaaggttcagggacccaaagggatttttggtaagggaaagcctttggtaaaatgggccgtgattctggccccgcccccacccctgtaacctggcggggggcggagttagcggggcgcgctggccagcgagcggaagtcgcccgggtggccag

SEQ ID NO: 49702 - DNA, 371 bp, Mus musculus
  source 1..371: mol_type = other DNA
ctcaagaacatggtcctatcaacacttagagcttctggaaccattatatttctgctatatcacgaaattaattactggcctagaactcacagagatctctttgcctcaaggtttcttcaggttgaccttgaactcactctggagcccagagggctgggtcattagcaaaagcttcttggggctatgcctaccatctaagtattttaaaatatgcaattcgttggcatacaataggaagctaactgaactttcctctcgcttcccaaaacactgttagaaggcaagcgaccgggcggcgcatgcgctcggctcccgggaccacagagagccacggtcgcgctttcctagagcggcccggaagtgtctaagtg

SEQ ID NO: 49703 - DNA, 159 bp, Mus musculus
  source 1..159: mol_type = other DNA
ctgcctcccaagccctgggattaaaggcatgtgactccgcaggtgcccaggctgtcctggaactcctgacccagtcaaatttcaatcactaggttccgtctgggcccagctcggaagctaagattctgaggggcggagttatggccccgccccggaaga

SEQ ID NO: 49704 - DNA, 165 bp, Mus musculus
  source 1..165: mol_type = other DNA
actccgcaggtgcccaggctgtcctggaactcctgacccagtcaaatttcaatcactaggttccgtctgggcccagctcggaagctaagattctgaggggcggagttatggccccgccccggaagaaaattatccaccgccatccgggcctggcccactcgtcca

SEQ ID NO: 49705 - DNA, 486 bp, Mus musculus
  source 1..486: mol_type = other DNA
ttgccagtgactctagactggctggccagagagccctactttcacatggatacgagtgattaaactcgtgcacgtttgtcaaactggaataactcaattttttttaaagatttatttcatgtatgtgagtacactgtagttgtcttcagacacaccagcagagggcatcagatcccattacagatggttgttacaaggtcatacactgctagtctagtcagcctgatgggtctcgagaccagtggtccaggctgcctggccaccagggaaatcgggatttgtagggactgcggccgccgcttccgctacagcctcaaagagcaggcgcggtccgggtcagcacgcggtctctctaggcacagcggaggcctacgctctcggtggccccggggcgcagggcatcaagtcctgcaagaagagctggaggcggacggccatccgatcctcccgcgtcccggtccgggacttggggtgggggtgcgcaga

SEQ ID NO: 49706 - DNA, 270 bp, Mus musculus
  source 1..270: mol_type = other DNA
tttgggcttctaatgcccgattaccatggggaaattggattacctcttcacaatggtggtaagttagtactaccatgtcctgtgattattaggacacagtatatatgtcgccattccaaaagtgtggaataatcctgtagctccatgactggtatctgtagtcctagggctagaccgctatgatagctattgctatttggttgtcattttgacaacccacaggaaatcactccattgccattagagcctagttcttcaggattagcgctt

SEQ ID NO: 49707 - DNA, 197 bp, Mus musculus
  source 1..197: mol_type = other DNA
aatcctgtagctccatgactggtatctgtagtcctagggctagaccgctatgatagctattgctatttggttgtcattttgacaacccacaggaaatcactccattgccattagagcctagttcttcaggattagcgcttagcttccggcggccgctccgaggagccagggcgtcctgctcgggaggcaccagcagc

SEQ ID NO: 49708 - DNA, 220 bp, Mus musculus
  source 1..220: mol_type = other DNA
gtgcctggcaccatcaccctgctggaagtgccacatgctgcaccaaggcaagctcagagctgggcattctcaagtcagagacttgtcttggttggttcagccacaagcacagatgggcttaggttgtcacttgaaaggtacatgtacatgcacaccaagatgcctgtgcccaagcttagagctgctggctagctgcccatgtgagggcctggccagacta

SEQ ID NO: 49709 - DNA, 308 bp, Mus musculus
  source 1..308: mol_type = other DNA
tctgcagaggtcacaggtactttgccaaagacatgtttgggaaacttttttcataaactgctcaggtcagatttcagaagtttgaagcaacaagttgtgtaggctggtagtgggtttgcagacaacccctcacccccaactgggtaacatagcacatactctgaggcatagatgtctgctcagcagcaaccgcttagtgtggagtctgactcacagctggccacgccaatggccagtcctctgtccgtaacctcacagtgcagtatacttcccagcctattctggttaagataaaccagagccattgg

SEQ ID NO: 49710 - DNA, 371 bp, Mus musculus
  source 1..371: mol_type = other DNA
agatgatgaaattatgttcagaattcagtatttttttctgaggtcattagtacagaacaggacttaaaagaaggcttgtggtgagtcaacattgtcctgagccactgtgttctcggagctctgtggtaactgttactataggaaaggcatcctttttcactgtagcaatgaagtgaggagcttcagcatccagatgtgcacaccttgtgtccctcaagcagaggagagaaaaataggcacataactgacctcccttctaaaattatcagatattcatggccgtaatctcataaatctgatgccctatgtgtgtgcgcgcgcacatgcacacacacactcactcactttctccagcaggcctgcttctggag

SEQ ID NO: 49711 - DNA, 308 bp, Mus musculus
  source 1..308: mol_type = other DNA
acatcgccgcagcaaggtacgtcctggtctgccagcggcggcggctcttggcacactcccaacaaagtgtggagcattcttgagtattctcctcaggcaaaccaggatggataatggcgccttgacctgcagcctttggaacggtgcaggggtggtcaacagaacagttgttcacccttagctcatgtattccccatgtgcactgggagagtctaatgcacacaaggccatcatgtccctaatatccttgcaaacaagggctctggggaccttggatctgatcatccctttgggttttgcatgtgagc

SEQ ID NO: 49712 - DNA, 554 bp, Mus musculus
  source 1..554: mol_type = other DNA
atatccctttccatgtcacagtatggaaccctgagaggcagaagcagctgataagcttcaggacttgaacaaattcaggtccatccattggattaaaaccatgttttcaaagctcttaaaaaaacaccaggcgttatttattactattattagagacagtttttctgtgtagggctatcctggaactcacgaactcagagatactcctgtctttgcttcaggagcctggcaacatcagaaatattgacatcattagagatgcaattattcgcttcatagcaccatttctcagaaaagtttatctcctggacttcccaggtcttgggctggagaggaaggaggcaaagggaccttcctctcgcagagcgcccctctgcttcgagagatcaggtcatcacttctcactagtgcaactagtgccaccgccttaaaagaggcggccccttctctcgtccttcccggcctcccgcgggcggcccgcgcggaggcgacggagattgccgaggggcgtagccacgccccctcactacagcctcctctcgcgcgggcggccc

SEQ ID NO: 49713 - DNA, 578 bp, Mus musculus
  source 1..578: mol_type = other DNA
ctgataagcttcaggacttgaacaaattcaggtccatccattggattaaaaccatgttttcaaagctcttaaaaaaacaccaggcgttatttattactattattagagacagtttttctgtgtagggctatcctggaactcacgaactcagagatactcctgtctttgcttcaggagcctggcaacatcagaaatattgacatcattagagatgcaattattcgcttcatagcaccatttctcagaaaagtttatctcctggacttcccaggtcttgggctggagaggaaggaggcaaagggaccttcctctcgcagagcgcccctctgcttcgagagatcaggtcatcacttctcactagtgcaactagtgccaccgccttaaaagaggcggccccttctctcgtccttcccggcctcccgcgggcggcccgcgcggaggcgacggagattgccgaggggcgtagccacgccccctcactacagcctcctctcgcgcgggcggccctccccgccttcccggcgctgccacagtggcgggacggaggatcccgaccagtcagctcgctgcggcctcgc

SEQ ID NO: 49714 - DNA, 362 bp, Mus musculus
  source 1..362: mol_type = other DNA
tttttaaagatttatttatttattatatgtaagtacactgtagctgtcttcagacactgccaccatgtggaacttcagaccttcggaagagcagtcgggtgctctatgtcacctgctgttcttctctcaaaagctgagtagggaagaggacttggccacttaggtccagaaatcttcctagagcaaagctgagctattcggctctgtctcctcaactccaggagtcctagagccagccagggagcaggggagtctccagtggtgctggtgggtctccccaccactggaagccccacccaagatggtttggcccaagcagagactttcagtttccatttcccagttgggagcataaggccaga

SEQ ID NO: 49715 - DNA, 335 bp, Mus musculus
  source 1..335: mol_type = other DNA
caattctaagaaggggcaaagtgtccacacttctaggaatttcataaatttattctttttaatagctgagtagtattccattgtataaatgtaccacgttggaacatcttctggatatatgcccaggagagaagtacttgatttccagagtggttgtacaagcttgcaattccaccaacaatggattaaggatgttgaacattgaaccagtttaaaccatacagctgtgtatttcaaagttcattacacacatttccaaaagtttttgacagaccaactgagaaggtaaggccagcctctaatctgggccacacctgctggaagcttacataaag

SEQ ID NO: 49716 - DNA, 278 bp, Mus musculus
  source 1..278: mol_type = other DNA
atcagagtgactttaattatatacttggtccatggaaacttgctcactctccagcctagtatggaagagagcctcctagacagagtcttctcctggctgccttctggactaaaagtctaaaagtggggtattgaggaggtgactcctaagatgcccatggcagctgctaggtctaggtgtcagctcaccaggtgtccaggagggatctgggacacacagttctttcaacagtgctaaggaccaaaagaacttgaccggcagttcccctaataaggcag

SEQ ID NO: 49717 - DNA, 324 bp, Mus musculus
  source 1..324: mol_type = other DNA
agtgttgtatgagcgggcttggtcatcccagcaaccacatggtggcttacaaccatttgtgcttctggtgtgtctaaagacagcgacagtgtactcatatgcataaaataaataaataaatcttaaaaaagaaaaaaaatcaaggttagtacatttagataatttcccagaactatggacattgatggacttcgttagctgtgcttaggtctgaaggcctactaaggtctaggagcctattactcaagaggatatgatatttctgtagaggcaggtcttttccctccagactacagagacccagcaagccacaagtttcctgtg

SEQ ID NO: 49718 - DNA, 295 bp, Mus musculus
  source 1..295: mol_type = other DNA
gcctgacctacaaagtaagtcgagtttatgtattcaatagtacatgcacaatatcaaaattcttagctaatattttcttgctgtgagaagacaccatgtagaaggcaacttctaaaagcatttagctggaattgaaagctcatttatgaatcaaacagttcacatttcagacacacacacacatgtacacgtatgtatatatatggagaaaacagggtccctcatttagagaccaacttagctcaagctttatcgagtgaagagacacaaaccagaaatttttctttcactttca

SEQ ID NO: 49719 - DNA, 279 bp, Mus musculus
  source 1..279: mol_type = other DNA
ctaggagaagggtctcaaagccccactcccacctcttaagagtgtaatagaaaatatttattgtgccagcttcaggttgaactgttaaccccccaaaccatattctgggttgacacaattcaattaaggaatattaatgtggttcaaggtttgctgtgtatgccatgccaggcagcatcaactggctatggagggtctcctactctatagaggcaggtcttttccctccagacctctccatccagcaagccacaacttttctgctttgggtatataagc

SEQ ID NO: 49720 - DNA, 561 bp, Mus musculus
  source 1..561: mol_type = other DNA
aatacactcaagaatggtttttaaataactgtatcatttttattagtattggattcatacacctacttttatatgtctgtctttctaggaactcataaaaatttctgttaagagcacaggctcctcttctggaggacctggttttgctcacaagcttctgtaattccagctccagaggatccaacaccagtttcaaatgagataaaaagacatcctttaagttttgtatttattattattatttttgctcacgttttaaaatgggtcacaaggagaagatgtagtttgttggccggaacttgatacatccaggctggcctagaactcagagatggtatgtgccactatgcctatgagccactgtgacaatgtaaaaggaggtcccccctttttaagactggaaattgaagcttagctcaagcttcataattgaccttcatccagaccagagaagctcttgacacatcagctcctgtccagagctgatgagcaggtacctggcaggcatcatgactggtgggtggttttatcataaggagacacaaaccagaattcaggccc

SEQ ID NO: 49721 - DNA, 432 bp, Mus musculus
  source 1..432: mol_type = other DNA
tcacatccatacagatatgtataaaaataatggttagcctttcgaggccagcctggtctaccaaaacaagaatctttttaaaaaaattagtggattcttcgtctattttttttttctacagaggattcaaagagggacttctgtctcaataagccatctgtcttcatggaatcagggtaaccttgactagctccctagagctgggatttcaagagaggttgaagcaaggttagcctgaatggcatgattgtgttgtgaccacaagaatattacggcctgaggtccacatggcacttgcctcaaatgtccttttcttcaaggtgcttagtaggaataagcaaggaagtttaagagaaagcctactttacacctgttttcaaggtggaatctggaattcttgaagaaagctcagcctgggaggcaggtcttgcc

SEQ ID NO: 49722 - DNA, 365 bp, Mus musculus
  source 1..365: mol_type = other DNA
gaggcctgcccatccccaagggtgggaaaggaatcccatcatggtgatgtgactctgtgcctggcaggcaaggaaggaacaaactcttcctttctttctcctttttgcagacttccagtaaaaagcctggtccagaaagttgtttctttcggcctccaaacagatctttagatttggtggggcatgctggcagcatgcccctccctggatgctctgaggggactcaaggagacacaggtacgagcttgtggccccagctccagtagtactgagactagcactgtccctgataaccagctgggctcttccctccttggaaaaaggagattaggaacccccttttaagaggaatcctccctcagaca

SEQ ID NO: 49723 - DNA, 543 bp, Mus musculus
  source 1..543: mol_type = other DNA
atacactcaagaatggtttttaaataactgtatcatttttattagtattggattcatacacctacttttatatgtctgtctttctaggaactcataaaaatttctgttaagagcacaggctcctcttctggaggacctggtttttcacaagcttctgtaattccagttccagaggatccaacacatgagataaaaagacatcctttaagttttgtatttattattattattttgctcacgttttaaaatgggtcacaaggagaagatgtagtttgttggccggaacttgatacatccaggctggcctagaactcagagatggtatgtgccactaagcctatgagccactgtcatgtaaaaggaggtccctctttttaagacgaagtaggaaattgaagcttagctcaagcttcataattgaccttcatccagaccagagaagctcttgacacatcagctcctgtccagagctgatgagcaggtacctggcaggcatcatgactggtgggtggttttatcataaggagacacaaaccagaatag

SEQ ID NO: 49724 - DNA, 314 bp, Mus musculus
  source 1..314: mol_type = other DNA
ctacagtgttgtataacgactgagcgggcttggtcatcccagcaactaaccatttgttggtgtgtctgaagacagcgacagtgtactcatatacataaaataaataaataaatctgtacatttagataatttcccagaactatgaacattgatggactaggaccttaggtctgagggactactaaggtctaggaacctattactcaagaggatttgatatttagtagttccgacgctgcgcatggtatcctgggctgtagaggcaggtcttttccctccagactacagagatccagcaagccacaagtttcctg

SEQ ID NO: 49725 - DNA, 374 bp, Mus musculus
  source 1..374: mol_type = other DNA
aattcactagactctgagtgtgcgcacaggctaatgccaccaatgtggccttttaaggtcccacttagtgcttcagtctcagagtatggatacatcacctgtgctgacccccccaaggccactgcccacctgtggggtggggttatggagtgggaaagtctcacaacttgaccctgagagatcatcaaggaccccttagaaggagcaaggtgtcttctgctctgaggatgccctgaaaccatcagaagggatgggcaactctcagggctgcacagccagccaggagcagggcagggcagggcagggcagggcagggcagggcagggcaggcctgggcagggcagggcagtccttcccagaacagcctttctgta

SEQ ID NO: 49726 - DNA, 315 bp, Mus musculus
  source 1..315: mol_type = other DNA
tttttttaaagatttatttatttattatatgtaagtacactgtttcagacaacttcagaccttcggaagagcagtcgggtgctctcctgtaagaggacttggccacttaggtccagaaatcccctacttcctagagcaaagctgagctatgcgcctctgtctgctcaactccaggagtcctagagccagccagggagcaggggagtctccagtggtgctggtgggtctccccaccactggaagccccacccaagatggtttggcccaagcagagactttcagtttccatttcccagttgggagcataaggccaga

SEQ ID NO: 49727 - DNA, 497 bp, Mus musculus
  source 1..497: mol_type = other DNA
aatttgccttcataaagccatttgaagaaaataatgcgtggacaaattctattaatggcaaagtacatttttttaaatgaaaaaaaaaatcctctcgtggaaaacaaatgaaatctacccttaaaataatttagtgacaaatatctgagatgtgtgtgagttaattctgttatgtaaaataccacttttcccatatatggtacttaatatctgttctcctggtaggacaggacgaagggcggagtgtcagagcctcagacctccccgctccctccggccccggcgcggcccaagctgcacaccagagccgggaccaggagcccagcgcgcctgagccgcttgcttctgattacccgcccaggcgtggctcccgcctaggaagcgcgggtaggccgaaaatctgggactcttggaagctccacccacgagccggcggcgagctgtagacccgccctcctcttggaagggcggggcagggagggcggcgcgcaccagag

SEQ ID NO: 49728 - DNA, 175 bp, Mus musculus
  source 1..175: mol_type = other DNA
agggacttacacctcagtcactcatgccagtgggaatggagagaaagtaccgccagcccttaggggcagaggagtatcgaggatgactttgaactcctgagccctccggggtcctgggattaggtgtgtgccatcacacccagtttacttggtatggggaggctttcccggaaat

SEQ ID NO: 49729 - DNA, 219 bp, Mus musculus
  source 1..219: mol_type = other DNA
gtgacatgtgttgatggtcagtccatgtaggagcctttcagttcagagcttaaaggtctctggggcaggtttgccatgagctcaaggccagcctagactatctagtgagctcctgtctcagagctgagtgtactgagatatccctctgtaatctcaggtctgtagtcggcagcctgaaaacactatgtgctaactggtccatgtgagcactcagaaacc

SEQ ID NO: 49730 - DNA, 417 bp, Mus musculus
  source 1..417: mol_type = other DNA
gcggattttagtgcaggctctaaagaaaacaccagcattccgggtgtgctttctttcaccattccaggagcaaggctcctttttaatgggaaagccaggtgagtaacttgaatatccttcctacacagaattgcagtttctcagtctcacgattgctggacatacaagagtgagccactatgctgtttgtcactttgtattgacgagtcagttacaaagtgctgggaatggccaatttataaatggcaaggttttctccaaaaatctctcagccaggcgtcccatcatggacctgctgttccccaagctcacagcacgtgtgcgccactcgcgccccggccgccccaccagtcccggcgtgctgcgcgtggcacacgtgacccgccccctgctattggcccggagtggggaggggcg

SEQ ID NO: 49731 - DNA, 220 bp, Mus musculus
  source 1..220: mol_type = other DNA
ggccatggtcattaaatttcttgtcatgtgtttgtgactcacgagaaaattgaagcatgaggacttagcctaagggtccaccagggcaaaccccattaagccaaggctgtgcccttcgctttaatatagggcaccacacataaagccagggagaaaggatggcgcctgaccttacggtctggacagagactccgtcagcactgactgacgtggctgtgag

SEQ ID NO: 49732 - DNA, 313 bp, Mus musculus
  source 1..313: mol_type = other DNA
tattttacaattttttttaaagatgtattttctaatcaaggagatctgctgagccagctttttaaaaaacgcccatccccccccttagccccgatctgaatatcgatttagagcgaggcactctacctgtgggacaaaggtttgagttgggacgaccacgctggggccagcgagcgcggcgggacaccgcggggacagctccgactccccgccacgccactgacgtaatcccctcacttgtgtctggcacctcaggggcgagctgtgacacacttccggttgtgtgacagcgctggtcgccgtttacggcacc

SEQ ID NO: 49733 - DNA, 379 bp, Mus musculus
  source 1..379: mol_type = other DNA
ggtggttattccactactaatataatggatatatgtatcacacgggaggcttgccttttgagatcaaaaaactgttccagttgcagcgatttttttaaaaaaagggaaaataatgtgatcgctaatttggagatgtctctcatggtccggacctagacagttagttccttggggagggagggggtcctcgaggcgcctccgtttcagaggagactgcccgctcagctgcaccggtgagggggtctcgcctcccatggttgtgccccggcggcggtaacggcggcggcggcggcagcggcagcggcagcagggttggcgggcgcggtggcggcaggacgagcagccgcggctcccggagaatcgaggcggggttccctcc

SEQ ID NO: 49734 - DNA, 323 bp, Mus musculus
  source 1..323: mol_type = other DNA
tccctcattatcacgtcaaattaggcctattttagattttagtttaatttaactgatacataacataaagtgatatatagttacatatggatatactgtgtgagtttccatcaggacctcgctctttcccccttccggaaggtgcacagcacgggtgctgtccgcagttgtttgctgtgcaagcatgcagggccttcctgagcaatccaaatgttctttgcacccggggtcggggaaatttcagcggcgtcacccctctcagtgagagacgctaggcggtgcccagcggtggaaacctctccgctttgtagggaaccggtttt

SEQ ID NO: 49735 - DNA, 387 bp, Mus musculus
  source 1..387: mol_type = other DNA
tatcacgtcaaattaggcctattttagattttagtttaatttaactgatacataacataaagtgatatatagttacatatggatatactgtgtgagtttccatcaggacctcgctctttcccccttccggaaggtgcacagcacgggtgctgtccgcagttgtttgctgtgcaagcatgcagggccttcctgagcaatccaaatgttctttgcacccggggtcggggaaatttcagcggcgtcacccctctcagtgagagacgctaggcggtgcccagcggtggaaacctctccgctttgtagggaaccggttttaccagttctttgggccgggtctaaggctggacttggaacgggttctgctccgccccaccggaacctttgcag

SEQ ID NO: 49736 - DNA, 428 bp, Mus musculus
  source 1..428: mol_type = other DNA
tgatcacaaaacatggtaatcaaaaagtatggtctgatgtagatagctatgctgtggggcctctctcaccttagcctccctagtttcctcgcagaaaccaaatcaagtttctcagaagatttttcgcggcataaattacattgtccgagatgcccagatcggagcctctctgcctcccgtatgcccttgacagcggcaggagatggcccctggcggcggggtcctgggcgagcctcctgaatgcccggaccccatgggcatgtggcccgctcagcttggcggtgcggcgggactgagctgctgagctgtgcgctgagccgggcgccccctggcgcggagccaggccgagcgggcgtgcgcctggcgcgcgacactgcagcgctggtcatatgagcagaaaggatgaggagaacactttttaatctttt

SEQ ID NO: 49737 - DNA, 313 bp, Mus musculus
  source 1..313: mol_type = other DNA
cactgtaggctttggagagctccctacagaaccaagcattagaaggagctgacgaagaacttcctccttctgctcagcccacggggccttggggattctgaagccagcagcgctgagctgaatgtggtatctcagagcccagagcccctcctggaccaagtccacaagtgtccttgatggacgtgggtggagctcagcaccagagacaggcactgaggccccaagctggccacttcctcaactgctgtgcagctgggaagtggctgatgctgggcagggcgggacctcctcaaaggctgcccctggggacacc

SEQ ID NO: 49738 - DNA, 397 bp, Mus musculus
  source 1..397: mol_type = other DNA
cccagccaggtttccccactgtgggcccccgcccagtgctgtggggaatggggagtggggcttccttacctccgatctcccatgggactctggaactcggaagccactgccagaattccaaattcagaccttgcacagcatctgtgattcacgaggcttgtccaaaggtgggctacacctctcctccgcctggaagctccagcctggtcctggctgcagtgccaaagctgtgtgctgcagacccattgcactgccaccggaggtatttccttgcaagcttggaaccgagtgtggctgccacccaaggtgcttcattaataggcctggtgaatgtgatacagacactcagcaccgtggctgggctgggggagcgccacctcccaagactatttaagtg

SEQ ID NO: 49739 - DNA, 319 bp, Mus musculus
  source 1..319: mol_type = other DNA
ttcctcagggggaaagccctgtccccacagccacgttccaaagttggggagataggagcctgattcaggcaggctgggcaggctgccatctcactgtaggctttggagagctccctacagaaccaagcattagaaggagctgacgaagaacttcctccttctgctcagcccacggggccttggggattctgaagccagcagcgctgagctgaatgtggtatctcagagcccagagcccctcctggaccaagtccacaagtgtccttgatggacgtgggtggagctcagcaccagagacaggcactgaggccccaagctg

SEQ ID NO: 49740 - DNA, 367 bp, Mus musculus
  source 1..367: mol_type = other DNA
gctgtccccgtgcccaggggcacttcataagaaatgtctcatgcataaaaaaagctaccttttttttaaaaaaaggctgacatttcatcccttatatttttacgcttatttgcttgtatttttaccatattaaaaaaattactcatgcaccctcaaaaacccttctggattttaggtccttcgatttgcataaggccacatgctgagaagtggttccacccagctctacctggctctgggcacacactcgcagggaggtggccctctgtgtctgcttcctccagagaagtctgaagggcacagaggcgtccacaattctgagaagcaagcaaagctgcttgtgaaatttcctccagatggggcacaa

SEQ ID NO: 49741 - DNA, 341 bp, Mus musculus
  source 1..341: mol_type = other DNA
gccgcataatcttgctagcactaagttcattcattcattcattcattcattcactcctctgggccatggctgggcactggcaatggcataccctcaaaacctttctggtttgtaggtccttctacctgtagctgatttgcataaggccacatgctaagaagctctgcctggctctgggcacatgcttgcagggaggtctctgtgtctgcttcctccagaggagtcagggaggagaattatcagaggctaatgtccacaattctgagaatcaggcgaagctgcttgcgaaagggcactggcaatctctgctctctgtttcctccagatggggcacagataaa

SEQ ID NO: 49742 - DNA, 384 bp, Mus musculus
  source 1..384: mol_type = other DNA
tttccccagagcaggaagcctctccttgcgcagcaaggcctcatgggtgactgagagtgcacactgtgggacttcagcctggtcagggagtcagcagccccatatgggcaggtgtgaacccggccctgaaggttcacacttgctgttactgtgaggcccagaggggattcaggccttccactaagtgccacatctctcgagttcggcccagaccagctgggttccccccaggtgggtgggagcctgaagccagcactgccaggctccttggagtacatgtgtctgccccctggaggtcaagcgcaactggttccggtccagcctggagacctcagggagcccttctgtggagccaaaggagaacccccgtgactctgcccataa

SEQ ID NO: 49743 - DNA, 243 bp, Mus musculus
  source 1..243: mol_type = other DNA
gaaggtccccagggcagctttgataaaaaggccacctctactcaaaggccagatgcaggcaggcagatatccatccatccatccatccaccatccatccatccatccatccatccatccatccatccgatggacaaaggtaaacgatctttgctcttgagccaagaagtgctactaaccctgaaggctggcagaagactaggctgctattgttacttcataatggctcaacagatgaggcagc

SEQ ID NO: 49744 - DNA, 274 bp, Mus musculus
  source 1..274: mol_type = other DNA
ttctttctaggaaaacaagggggctttaccttccagggagaaacactctaagtcagggtctcacggggccagctcttcccaggcaagctggaggctgaggcaagagtctcatgtctttaaggatggcctgggcctcataatcttacccgctgggcagcagagctagtagtgttccacagagtggcacatgagagactcccctgcaaagatactttgttactctgaggtaacaaaggcctgggcatagtgtcgccatggcaacttcctagtaacc

SEQ ID NO: 49745 - DNA, 379 bp, Mus musculus
  source 1..379: mol_type = other DNA
gtagcagataccagggatttgcgctccccaccaacctgcggccagccaaagggaggagactgggcacagcccactgtttgggcccgtactgcgggggacgcaggcgccatgaagccgggttgcgcgctgccccagtgtgttcggaatcccgactgtctacgagagaggtttctctcctcacccccatgggaggcggtacaatggtgcgggccacttgagaaccgactgagtgcagcgagccgcccaggatggagccgctagctgggcacctgccctcctaggcaccagaaagggagggcgcttccctagggaatgtgccaacctctcccactgtgagtctggctctgagtgacagccccgccccctgggctccgcccac

SEQ ID NO: 49746 - DNA, 374 bp, Mus musculus
  source 1..374: mol_type = other DNA
gcacccgaaggctgggccccaggcggccagaccgaatggattccgccagccacttggtggataccagcgcccggtgtgggcggagcccagggggcggggctgtcactcagagccagactcacagtgggagaggttggcacattccctagggaagcgccctccctttctggtgcctaggagggcaggtgcccagctagcggctccatcctgggcggctcgctgcactcagtcggttctcaagtggcccgcaccattgtaccgcctcccatgggggtgaggagagaaacctctctcgtagacagtcgggattccgaacacactggggcagcgcgcaacccggcttcatggcgcctgcgtcccccgcagtacgggcc

SEQ ID NO: 49747 - DNA, 278 bp, Mus musculus
  source 1..278: mol_type = other DNA
agcccgggctggtctggaacttcctatgtagactaggctattataggaggtacatctactaactcaggtaattcaaaagggtgttccctcagcaggctggggagaggctgctgagtagaccctggcccgggctctaccctactttgctgggcaaggaatagagtgagggacacgcaccaccctctcctttcaaagcctggcagggggctccctgggtgttaaaggcagagcctggctcacccaaggccctgtctgagttcttggactctgcctgaatg

SEQ ID NO: 49748 - DNA, 305 bp, Mus musculus
  source 1..305: mol_type = other DNA
gagctttggagcctccccacccaatgggggagggggctattctaaaactccccttccccattcatcttctgaagctacatatcctcaaagaatttaggaagaggtggtgactggctcatgcacgcatatgcacacacgcacatgctcacacacaggcgcgtgcgcctatttttaaaagtaggttcaaagttcttccaggtattcctcagctggggccccctcactgttttcgcagggccttctgcaaaccaagcagtctggccacagtgctgtccgagcaatgccctgcacctggtactcgcccg

SEQ ID NO: 49749 - DNA, 306 bp, Mus musculus
  source 1..306: mol_type = other DNA
catggtgaggctgggtgagactcagtccctctgcagcagctcatttacatttccaatggactaatgggcctctctttccactgatggccaactaggcagttttgtagaataccagtaattcctagattcagcagaagtcacgggcccaggactttctggccagtgtctgcagttcaccctgttaggggaccaggggccaggccccgggggagagctcaggtctcctgctcctgcaggtccagccccctgggcacccatggggcagggcggggttagagaggcgggcactaactacttgcctcctgc

SEQ ID NO: 49750 - DNA, 362 bp, Mus musculus
  source 1..362: mol_type = other DNA
cttcctgtgaggggatgaacaggcagttacagctgccccgatggtaatgttatgtccagagaacagaattcttacaactcccttcttttcacaagagggcagaagcttgtccaagcctggtggtcctgtgatacaatatgtaaataaacacccattcatttacggagaaattcgtgacttcattgttaaaaataaaagaccctatctcaccgagagaggaaggtgctgcttatcaagccttaaaaccagtccacctagactctaggtcctagaggtgtgtgcatgcgcgtgtgtgctcatgcgtgagcacacagtaactgtgtgagcgtgtgtgccaccacattcagtggctgcccctgggc

SEQ ID NO: 49751 - DNA, 355 bp, Mus musculus
  source 1..355: mol_type = other DNA
tgggctagagagtaataccactgccaagaccctctagctgctaacctggagagaggctacttttgaggaccaaggttccccagagaggtgaaacctagctgacctccaggaaaccagggctaggagccacagggcctcccccagctccaccttgaacatgttggggatgggtaccagtggctcatgccactcagtctctgtgggctgcctcccttttcctgtcctgtctaactcccagggcatttgactcaaacaggtccccagcgctgggccagggccacagatgcccctccgaggcagagccccaggctgaggaggggactgggaagccagctcagcgtgctccctcctccct

SEQ ID NO: 49752 - DNA, 257 bp, Mus musculus
  source 1..257: mol_type = other DNA
cattcccaaggttgagtgtgcatactctcttcggacacatgcaccctgttggtggtgacacctgcctgaggggggcatttctttaaaaaaaaaaaaaaaagcaaagccccgtcttttctccaatgagatttgattcaggggtccatcgttaggtaggaagtgcgctctgtgtcaggagcctgcgcacagacccctgtggccagggctgacttcctcccacagggtctgggcggggcaggcaggaaggggccatgact

SEQ ID NO: 49753 - DNA, 185 bp, Mus musculus
  source 1..185: mol_type = other DNA
taggttgaacctgccagggattgcccacaccggctcagcggccaggcccagagcagaccaggttgcaagcttgtgacacccaccctgggctcagctctggggagctcaccgcgtgattattagtggcctccagaaacaggacaccattcttgttaggtcctatccctggggataggatctaaggg

SEQ ID NO: 49754 - DNA, 321 bp, Mus musculus
  source 1..321: mol_type = other DNA
tcagcttcctgaaagcttagattgcaccatgctgtgagaaggtttcaaacacgtcatagccaccagttttccctgctggtgagcacctgtggtgtggtttgccttctctacagagcaggaactccaggacaacctggcttcctgcggcactcaagtgtgacttttgaggatgagtgaatcttcaattctctagggtgcctgggttccctttggagcctaagtcaagtgcccttggtggcctgggcccaacctagcacctgtggggccccaggtcctcccgcatgctccaccccctcaaggctgtggggcagcagcttgggt

SEQ ID NO: 49755 - DNA, 357 bp, Mus musculus
  source 1..357: mol_type = other DNA
cagcccaggcctgttaggagttccagcagccgggctgagtcaccacctgctggcgcagactcccaccagctgcttgtgtgcccagcttcgggtgactaccgctgccttgcagggagactcccttgctttgtggccacagagcccagactccacggactcggactcgctgtccgggaacgcagcagctccaccgcagtgctctccagtggttacacgcggaacaccgtcctcgagcagggcgctgcacccggggcaactttgcctccagctgttgaatgagctgtggggcggggccggggggcgcgctcggcgggtgcccggggcttggcggtccgcggtgcagccacctcacagggc

SEQ ID NO: 49756 - DNA, 308 bp, Mus musculus
  source 1..308: mol_type = other DNA
aaatgtgaatgaaagtgcagtcagtctggacacttgcagggactgactcccttctttggaaaggtccaggtctccggtcgaagtcctgcttgcagatatttcctgaaagacagatatgtattatgtgacgagcccagagctcgttccgggtggccagctgcacgggacaaggtgagcagcagcggcggcagtggccctggcggtggcgcgcggggtgtgggcgcgcgcgtggcggctccgccccgtcgggggccgggcaggtgtgggagggccgtgcggaccccgccaggactggcccggagagccgg

SEQ ID NO: 49757 - DNA, 363 bp, Mus musculus
  source 1..363: mol_type = other DNA
agggggcatgtccctgggaattgaactcaggtccatccagccaggttgtggccctagctgggatctgaacccagccccaagcctaggctttttcctagtgctccaggagcctttagcaggcttgtgcttaattaacataattaacaagtattgatcaagtgcccagtatgtaccaggtaccgtactgggttctggatagtccctgaggctggctggacaggatcctggctattctaggagccaggctgcagcagctggcagggccctgtgcctcttccagtgggtggctcccagcagctgcctctggggcttcccaggcctagccccgcccctcgggctgaggcaggggcggggccaggagct

SEQ ID NO: 49758 - DNA, 282 bp, Mus musculus
  source 1..282: mol_type = other DNA
ccgaacccttgggttcccagcagaaccaagctcttttgtgcatggtgccagggaagccacagggcatgcatccgcacatgtgccatggtcccttccgtgagctccgggaagcaaaccccggtggttaggcttggatttttgaagcaaaatgtgtgcagccagatatagtgtttcctgcctgtaatcccagcacttggggcagaagttgtgtcagactctgtctttgaatgactcacataacagagccagcctgtatatacaaagtccttatttatggcctcg

SEQ ID NO: 49759 - DNA, 483 bp, Mus musculus
  source 1..483: mol_type = other DNA
ataagtgcgaaactgaatgcagaattaagtactcggtgcaagcactctcataacctggctcccgggtttgaatgtagaggctttaagagctaaacaaacgttaggccacagtgcccagtgccctttagggcatcttcccacgtaagcggaagtacccctgagggctccggaagtgacttcagaaccccttcagaaacatggctccggagcgttgtcccggaagcggtcacgggtctctggtcccgcgggctcccgcccgagcgcccggagctgcgaggccgccgaccagccccaccggcgactccgccagccgccagggggaggggcgccgacgaggcgacgctctaggcggctccacccgcgtctcgatggtgcccggcgtcccggtgccgcgttcctactccgcggggtggacgcggcccctttaaccggccgagggcggagccgaggagttcccgcgagagcggccggggggcggggggc

SEQ ID NO: 49760 - DNA, 244 bp, Mus musculus
  source 1..244: mol_type = other DNA
gagagggcacagtagccagttcccccgacggccgccaaaaagcgggtgaaagtacctcacattttggtttggaataagtgcgaaactgaatgcagaattaagtactcggtgcaagcactctcataacctggctcccgggtttgaatgtagaggctttaagagctaaacaaacgttaggccacagtgcccagtgccctttagggcatcttcccacgtaagcggaagtacccctgagggctccgga

SEQ ID NO: 49761 - DNA, 326 bp, Mus musculus
  source 1..326: mol_type = other DNA
atgaaatcagatctctgggttcctgtcagggttctctgaatatggaaatcagagctcttcctacctctgattctgagtgctgggatttctctccagtgttttaaaaatcatttatctaaagccatcgaactataaagtataaccaggtctaagagcccaggccagcttgcgaagtcacgggtgatggagccctggctccatacaagatgtggcccgaagacaacatctgcacggcgattcgccagcaccttcgactaaattctagtcgctattggctgaagccgcgccaattggtgaagctgccccttgtccacggagggagcgca

SEQ ID NO: 49762 - DNA, 368 bp, Mus musculus
  source 1..368: mol_type = other DNA
tgaagggtgcatactgaagtcagcttgcagttgaagcttgggactctttaaagtgtagagtgacaggaccgcagaccagggtatcttgtttaccctgtggtagtcccaggtaccccaagttctgagccagtggtccatggcctgcacaggtcctgaaggcctgtcccttctaggcagccttcctttccctctaagagagcaaagtggcaggagcagcttacctgcttcccgccacccgccgcggtgacaggacaggctgcgggagacagaccgacggacactcggcaggcgggtcggacaacccgggggtcgttgatcgtgagcgggggaggagagcgcccgcgccagcgccagcaccagccagagga

SEQ ID NO: 49763 - DNA, 491 bp, Mus musculus
  source 1..491: mol_type = other DNA
ctcactaaaggtttctaaggtgtgacctcatttacctgttcagcaactctcttagttgttagagcggagaacagaagataatgtaatatctgatgtctgcccatcctctggaagagcatctgctgagccctgtctccggccccatggggaaacttacacccctctacatagtggtcagctgtaaaggcctagcagcttcctgcaaggaaaggctggaggcccaggacagggctgtcaatcctggactccccggcagcaaagagtcccagtggcctcctccaggcagtccgggctcaagacagagcgaacattcccgaggtcgccccgcctaggggtggtgggcaggggcctggcctggcttggcatccctgccgcgccactgcagcgctcgcggcgtggccagccagcccgggagggggcgcggccgccgcgggcggagcaggggcggagggagcccgcagcccgcccccgccccgggatctggcggccga

SEQ ID NO: 49764 - DNA, 462 bp, Mus musculus
  source 1..462: mol_type = other DNA
ggctgggaggggctcatcttcatgccctctgaggccagcacggagcgggcacatctggcacaccctggactgccccgaggcttgcctctcaggccccggggatgtcacagccaaggcactcagaactctctgcaggccctgcagtgccaaggtatgagccaaggacaccagcctcaggcctggcgcccagcccaggctttactgagccgtagccacagtcctctgctagtcctcccgcagaagcccacagtgggagtcacagcgagagccacaccctggcctgccaggcggcagcctcttcagagagccttgtgcgctgggacctaggggctttctccctgctggccccaggccccagcacaaatctttttttagtggaaagaggagggggggtctcctctctgactggtcaccaattggctgaactcccggggaggggcgggactcaccgggtctgatcca

SEQ ID NO: 49765 - DNA, 274 bp, Mus musculus
  source 1..274: mol_type = other DNA
ctctattttataaataggaaacatctgtaactctaagatttatttatttattatatgtaagtcactgtagctgtcttcagacacaaggtcctcatacagtagacctaaactcacatccacctgcctctgcctctcaggtactgggataaagatgtaccataatttatgatttaatactttgtaaagagtttccctcgctcaaggaaatcatgaaagagttgacatctgaattcaattaagttcagtaattcttagcggtttataaataaccacc

SEQ ID NO: 49766 - DNA, 262 bp, Mus musculus
  source 1..262: mol_type = other DNA
ggcactccacagtggcctgtagcatctgatccttgttgctatacgtctttgaagatatccctgggcagggatgctctgtgctactgagaccctgactacagtaacttagagcgatttctggggttagaggtgtacggaagccccttaagtccagtcctcaggccccatggggacatgcgggcgaaacgtgctgtgcatcccgcgcggcaaggcgcctgggcaccgcccgcctctgccccgcctggtctatcacgcaagtcct

SEQ ID NO: 49767 - DNA, 511 bp, Mus musculus
  source 1..511: mol_type = other DNA
atactgacgtatctccgcatgacagggggacccagagaggttgaccagctctcacaaagccactgggccctatctgcaccagtacaagcggggttgtgatgaactagctattgaagccatgaaggtgtgactccactcaccctgagcctggggctttgctgagggccttggcagagatcacatgagtcaacagtgcccaaggcctggcctctgtgcccctttagtgtctcccagagctgggtaggagagtctccctgccccgacacagttctgagtgctggggctgaggcagtgtaagaggtagcccctaagcctgtagcctgggttcaaaaccacccgtccccggctggctaggctggacatggaggcgctaaagcaggagctgcaggtgctatctgagagcgacaaggcaggcagaagagcgtgagcacaccctgcggcgctgccagcaagagggccaggagctgctgcgccacaaccaggtaggcggggccctggcaggcagtgagtg

SEQ ID NO: 49768 - DNA, 329 bp, Mus musculus
  source 1..329: mol_type = other DNA
agagaagttgttttaattacttgacttagttaattcagtcacagcatattctggctactgccacaaaagttccccctgggaaacttccagaaagttttcaatgtttgaaccactgcgttcttacagtgctgaactgcgttcgccttgcaacacagtcgccttggccagatgcaaccgtcactctggcagggctccgattcggccgtgagaccggactgccccgccgcagtggagtcacctgcacgcaggcccttccttcctgcgaaccgccggccggagagcccggcccgccctgcccgccgccccatccgcccgccccgtcgtacagg

SEQ ID NO: 49769 - DNA, 694 bp, Mus musculus
  source 1..694: mol_type = other DNA
gccagtgggagaggggaccttcacccctagggtgggcctggggggtggttgctaacaaggcaggcatgtaaatcaggccgcccgggaggcttgtccgcatcttccaggggtcccaggaagctttggggggctcgggctcatcaactcgccgaggtccgacaaagtttgaaagtgcccttccaactctttcagggaaagtttccttgagggcctcgcaggcgtggtcgggtgacccccgagaggtgaccggaccctggggaggcgacccctccccccttgtcccgactcggcccggctgggagtcgcccagctcagggccgcgtgtgttagttggggccgcttctgagccgctccgccaggttgggggaccccgcaggcatccgggagtggggctcctggtagtcccaggggggagctttccgacggggggtctcaagccccggggctccccggctccgcagagccagccccccgcaaaggggaaatgtgccggcgccccagcgctcctcggcgccgtttgaggctcgtggcgggcgcggggggcggcggccggggcgccagggtccccagaagggaagcctagggggaaggcccgggccgccgggatggcggcagcgcggcgccattccgggccgggagcaggcagccagcagcccagtcctcaccgcggtccgcccgccgccgctaaataccc

SEQ ID NO: 49770 - DNA, 430 bp, Mus musculus
  source 1..430: mol_type = other DNA
catgcctcagtgtgcctatggaaacagtttgtgcatgtgtgtatatgtatatatccatatctaagactaggacttagtctcacttcgggagctgggagaaaaaaatctgtacagttgtctttctcttattttaataaaattagaaacttttaaacaagtgtaactattactgtggttgtaattttaaaactttaaaataaaactggaaaggaaaaaatctgagtggtgcgtttttctttacgttcgcgccagatagcaaagctttggagtgacagggacgctccaacaggagggtcagctgggcacgtagaggagaggcgttgaagtcgctttctccgcctactcagcttcggcgggccgacgctgtcaggctccgcccgcgggtggaccggggccctgcccacgtcacgtgacggggagcactagactt

SEQ ID NO: 49771 - DNA, 214 bp, Mus musculus
  source 1..214: mol_type = other DNA
tcttgcttaaataaatcatttctaaagtctggtcagaggtgaaatttctcgctgcaggcaaaaccgtcctccgccatccttgagatggcagataatgtcctttgaaaagcccgttttgcagggactctgatagtttaggaactcttccccggcgaccccggaaaggctttcgggcaggttgggctgggcgggacttccggtccggccaagcagg

SEQ ID NO: 49772 - DNA, 432 bp, Mus musculus
  source 1..432: mol_type = other DNA
gaggcagaggcaggtgaacctctgagtctggggacctccaagaaggtgcccttctattttatttaccagctgatagagtataaatgacaagttcaggccagccgtaggactttcagggctgaggaattgctcttcgttaatcttgtataattacatagaatataatttttttctattacgttagaagatattagcgcctatttcgtgatggtatctttttttttttttgagttcattgactcaaaacacacctacacgagagtagttccattcgtctttccggagctatcacaggaagaaaaggaagaaaggaggtcctgaacgcagctattttattggctctggtagtaacaccgcttagtgcaaaagcaactctaatttgtgattggctcttttgtccgccagtcatactaccgaaagcggtccgacccg

SEQ ID NO: 49773 - DNA, 300 bp, Mus musculus
  source 1..300: mol_type = other DNA
ggtgggtgccgcctatcactgctgcactgggtccctgagcacaaggggacccacaggttgtaaactgcggcgtgcgcacaggcacgtgcatggggacacatgtgaacaggttgtgatattagccacttgtgtcacctctttgtgttgcttccctaggaaaccgtgtgtgtgtgtgtgtgtgtgtgtgtgacacacacaaccaatgtgactgtctcacatgctgaccaggctgaaagaaccagattcctgggtcaagtgccttgagacctggcctcctgtctgaagacccatttcgctgga

SEQ ID NO: 49774 - DNA, 289 bp, Mus musculus
  source 1..289: mol_type = other DNA
tttgagcctgggttaacagaactccaaaatcctgtttcagatgactaaaaccctagaaggtgatgggggctgattcatcaggaggcgcctggggtctcctggtggggtcttgaagaaaaacctcgacttgaggaagttgtcccttcttccaggaggggctccccaagggaagggtgcgtccgcccttccggggaaggggctcgacggcgggggcggggccgcagggtggggccccatcctcctcgcgctcccccgcgacgcgggcgggcaggggcggggacggaggcgg

SEQ ID NO: 49775 - DNA, 404 bp, Mus musculus
  source 1..404: mol_type = other DNA
ggggtctcctggtggggtcttgaagaaaaacctcgacttgaggaagttgtcccttcttccaggaggggctccccaagggaagggtgcgtccgcccttccggggaaggggctcgacggcgggggcggggccgcagggtggggccccatcctcctcgcgctcccccgcgacgcgggcgggcaggggcggggacggaggcggtgggcgcccgcggccggcccacaatgaggacagcgggccgcggtgagtaagcggcggccgcccgggccgggccacgcggggcggaggcttcgcgggcaggtcggggcaggctggccgggcggggtcgggagccgagtccgcagccctagccgcgccagagcggagcgaagacaccgaggccccgccccggccgccggtggcgccc

SEQ ID NO: 49776 - DNA, 453 bp, Mus musculus
  source 1..453: mol_type = other DNA
tgaatctctatgttcgaaccacctgatataaggttatatttggtctccaaataaataaaataaaaatatggggaggcagaggtgggtgaattcctgagttcagcctgatctacaggacagcctgggctatacagagaaaccctgtaattcaaagccagccttagctatatagtgaattcccgggcagcctgggtttcagagtgaggccttgcctcaaacaacgagagcgctcagaggacaggggccacacggactgaactctctgaccactgtccccattgctccgcgaggtaggaagttctgaagacttcgctgccttctccgcccggggcgcagagcagagaacgcgcgcctttgcccctcgccgcaccacgcgtagtttgcgcttgcgccgtgacccaggcgcagttacttccgggaagcagcggccgaccagacgctaatgcgcgtgcg

SEQ ID NO: 49777 - DNA, 392 bp, Mus musculus
  source 1..392: mol_type = other DNA
gtttttgtcgttgaataattaagtgcatacatgctcattcatgtaggcagaaacaggcacgtttctttgcctggtggtgttcaccatttagaaggtgacactaaacacctctaagactgtatagaaaaaccgcaccgctcgggttgagcagctcacaagtctgcttacggcagcggcggaacccggttcctttggtcaccgagtccaccctttcctgggaagccatgggagggcccctgagaagctggtgcccgacccctcggctccggacagcgcagtgaccacagtccctatcgtgacggtccggggaggagcgctcacccttgttaccatggtacgcacgcacgcgcattagcgtctggtcggccgctgcttcccggaagtaactgcgc

SEQ ID NO: 49778 - DNA, 246 bp, Mus musculus
  source 1..246: mol_type = other DNA
gagccagggcagttcctgtcttttctcagtgtaagggacttcacatccagacatccaggactgggtctcctttccagggagaggaagagcccttcatggaagtgagagacacccccagaagtccagccttctggatgctaggatgatacctactgcaggctgcggtgcctagcacacagtgggaccacctgtggcaatcaggcgcaggatgaaggcagcgctggaggctccaccttctgcccttcc

SEQ ID NO: 49779 - DNA, 391 bp, Mus musculus
  source 1..391: mol_type = other DNA
atcctagcatccagaaggctggacttctgggggtgtctctcacttccatgaagggctcttcctctccctggaaaggagacccagtcctggatgtctggatgtgaagtcccttacactgagaaaagacaggaactgccctggctcgcatgggccaccccactgacagtgtgtggcttctctgtcccacttagctaggtaaggccctaggcccacaccaaacaggtaccttctggagtcgagctggaactggggtctggagaatcaaggcctcaatcacaaccagccagacaattgggccagtgtgtctggggagactcttgttcggggccttgaaacagtgagctgtctttgttcgaaatacaggtgaacggcaatcatgtgattaacacac

SEQ ID NO: 49780 - DNA, 269 bp, Mus musculus
  source 1..269: mol_type = other DNA
gagccctgcccgtggtcagacacagggcaaggaccatctatccacactgtgcgcacacaccaggggcagcaggtgccactctggaatctggtccttggcagagaccaaggggcctctgaatagagatgtacggtctcagggacccttcttgcggctgaagctgggtaccccaagttcctttaggaattctgggaaagagccacattgcgccaaagcaaaccaaagtcgtgctggctctgccttcctgaccggaaggcgccatagcccca

SEQ ID NO: 49781 - DNA, 420 bp, Mus musculus
  source 1..420: mol_type = other DNA
tctttgtaaaatacaagtggcgtctttcataaagatttgttctataaattaactgaaaaaaaaaaacaaactcaagacccagtatggttttgaccatgcaccccccagctgaggaaggacactggtcccactcttcccactggagctccctagctgcaagcctcaggaatcttcaagaggactccagacgcctcgggccaaacctctctgagtttagcacagatattcaaagaccccagaccggttctcgggaccaagatctggatcttaaatctgaaaaaagttgctccctctcattccagcactacaaaatgtgaaggcaaaggtcttgaggtttgcagttcactgaacttcactggccccaggatgctcccgttgccctggcaaccgcgggcctaagtggtccccagagtgccgcta

SEQ ID NO: 49782 - DNA, 392 bp, Mus musculus
  source 1..392: mol_type = other DNA
cccccagctgaggaaggacactggtcccactcttcccactggagctccctagctgcaagcctcaggaatcttcaagaggactccagacgcctcgggccaaacctctctgagtttagcacagatattcaaagaccccagaccggttctcgggaccaagatctggatcttaaatctgaaaaaagttgctccctctcattccagcactacaaaatgtgaaggcaaaggtcttgaggtttgcagttcactgaacttcactggccccaggatgctcccgttgccctggcaaccgcgggcctaagtggtccccagagtgccgctaaggaagctgggaagagctctgaacggccaagggcggggtccggggccgccgacatgtcgcgggacttccgcgt

SEQ ID NO: 49783 - DNA, 393 bp, Mus musculus
  source 1..393: mol_type = other DNA
cccccgacccccgccaagttcctgcagtgagcgctggggtgggtctgagcccgtgcgtgcacatgggcaagctctcatgcccaggctggcactgccgcaggcctagaagttgacaagtgatcattaaccctgactaaggcacccttggagaagggaatctcaggccaggccctcatggcctaggacacagcaccctttgttctggccaaccagccaggctcaggcctggattagccttatccaagggaagccaggagcccctcctggagcactgaagtgacttgacagcctcatctctccagactgtgtcagccctgctggctcatgggcacttgtgccagttcccttcctggtaaaagctgcttagcagggcccgagtgcagccaccattgc

SEQ ID NO: 49784 - DNA, 356 bp, Mus musculus
  source 1..356: mol_type = other DNA
accccctgatgtcagggactagagaaaaggggttccaccctatcctagtggaatccaggctaatggcatccagcacctcaactgtgaaataaacgggtttacactcaagttcattgtacagtgttccagcagacatggcctgatggtctgtctgaccagggagatctagggggcccctggagctggggccacactcctgccccaagtctggggctcagtggtcaggtccagcattcctgggttccgtcctagtggacagggtccccttcaaggtgaggcctgtcagtgcagacatgtcttccatgtgcagggggctcccaggcgtggggcctagcctgcctgcgtcacaggatgcc

SEQ ID NO: 49785 - DNA, 372 bp, Mus musculus
  source 1..372: mol_type = other DNA
tgtgaagttgtcatgttttaaacttcaaagctgaagaagcctcctggagttccatagccagctaggctaacccagtgggggagcgagttcatagccagcttggtcctaaccgttaattccatatttttatttgcaatttggtttgggcaacatcaaagcaggctcttcccggttattatcttcatgtgttgccagaaacagaaaagttcagagtccgagccaccctggattcctcgaagggagccggccgccccctggcaacagaagcggcttccgtgcgaggtccacgcttggggtcggggccacagcctgcctgcggcatggagtgacggcgcggcgggggcggggcctgacggccctttcccaaacctc

SEQ ID NO: 49786 - DNA, 290 bp, Mus musculus
  source 1..290: mol_type = other DNA
ctagaattgagaacttgagttcagaggtaaattttttgaacacctttttcttataaccattccactaagtacgtagagatcagaggtcagctttctgaagcgtccctgggaccacgtgtaggcaattgctggtgtcacgtgaatgcatccagaggacacagtcccagcacggagaaccgtggcggctctggctgtgggctcctacagcggggtctactgggggcggcgcctcactcgggcgtgggcggggtctcggctccaggcggccgctctggggcttgctggcggaa

SEQ ID NO: 49787 - DNA, 297 bp, Mus musculus
  source 1..297: mol_type = other DNA
gatgattaaactcttgttatcaaacttgcatccttggaatatcttgcttcttgtcagcaatatcggaagagaaaagaaaaggcaggtttctctgcttttgtctcttacactgctctgtttcccagacttagatgcaggctgtcagaggggatggaagtgacaccctcaaccggtctccccatcctgtgactcagagtttggtagagggggtgacagtgtgcagtctggcaggacagccaacagggaagtgacgatctcactgaaagataagatgtgatagatcccaaatcattctct

SEQ ID NO: 49788 - DNA, 439 bp, Mus musculus
  source 1..439: mol_type = other DNA
tgctctcaggagcactgagcctgagcgtcatggaagcattagctcccggtcctagatgctgctgtgatcatgcgcgtggccctagctgtggcttgatagcagcatacacgctggactcctcctgcctgcagtcagcagtgttccactgcctggcacggagctggcactgagtcaggccgggcttgaactcattgaggccctcgattaaaggactggctggtctagaactctctacatgactaggctgacctcagacacaaagatctacctgtctctttaaaggtgtagacaccattcctggtttggctttgagtgcaggtgtgcactgccatgctcggcttagaacaggacgggaggccagcagtgcccagtgtctgcctacagtccttttccttctctgagctggaaaccagaggggaaggagcctttgtgcctgacc

SEQ ID NO: 49789 - DNA, 298 bp, Mus musculus
  source 1..298: mol_type = other DNA
cattcctcgaaggataatactagactttctggcttgaagactggatcacattttaggtggggcagctccactagagcagtttcataaactcaagctagctcgcgagtgtccgggacagtctgtatcccgcgggtcagactgtgcatcccaggactaaacctgggccctgggtctctcgcgtttgcgagttgcaagaggaattgcgcgtggtgcttcgcagcgcgcggcccctttaaggctcggcgagtgacctcagcggcgcgctccggccccgcccccgccagcggcgttcctagtg

SEQ ID NO: 49790 - DNA, 405 bp, Mus musculus
  source 1..405: mol_type = other DNA
tgatcggcatccccaggtccaccagatgaacatggccatcttgctgggctgtgtgggcctgggcagaccttgccctctctgggccacagaagatgcgtactatgtccacagtaacagttgtgtgtgtgtgcactgtatctcccatgaccctgactcacgaatctgagggactgtcacagtggagaaaagtgtctgcctggagttttctctgacctctacagccttcaggctactgagccctagtctcagctgattctctcgggggtccccgcgtgcccctcacccagggtggcagcgtcagaacacgctctccgggggctgcgggccctttaaatcctccggggcggcggcggcgggcgggggatgacatcagcgggcgggcccggggctcaatgggaaccgcgg

SEQ ID NO: 49791 - DNA, 717 bp, Mus musculus
  source 1..717: mol_type = other DNA
cccagggggggagtggatcctccttggaacggatcctccacgcgcgagaaccggacggcgcagccttccccacccccgactcctgctggagtcctgggtcccgggcgctagtggcctgcccgcgtgggtcagacgcaccaggagggccggggtggggtccgcctggggctggcagccggggcgcgctgcctccgcagcggggcgcgggtcacgtgtcggggcgcgtgctgcgagttgggagttctcggcgcgccgcgggcggcgggagctcaggctcccgggcgagccggggacgcggcggggaccgggtcccagacggagggaggaggcggcgcggggcgaggctgagcccgggcaggggccggagcgcggcgaccaggtgccacggccccgcgggaggagaggcggcaccggggcacagcggcggggaccttgtggcaggcgcgaggtggccaccacagcgggcagtggggcgccttgggcccctggacccctcgacccgagcccgggctccacgatgctgccgcccgggcggcgcccagctcttgacgcggggcaacgcggagcggcgcgggacagcgcggagaccccgagacccacagaggccgcctgggtcagtggcgacatcgcgggcaggcggcgcccgcgtcccaagcccggcgccccggactccgcccgccggactgcgccgggggatgtagcggacactcgccgccc

SEQ ID NO: 49792 - DNA, 358 bp, Mus musculus
  source 1..358: mol_type = other DNA
catgcccaggtcccccatgctgcgcagcaaagcctcccagaactgctttgtgcgggccatagctatagattaatgtgggcatccccaaagtcaatactgaagcccagaaaggggactcagagtcagatctcagagctagctcaggttatctcagttcccgggagttccaacctgggaggtcttccgcggctgaaagcctgcttcctcaggacttgaagtgagtgccaggccctgactgtggggccagcagcggctgtgtaagctgccccgcctgtcggcgtggggacgtgagaagcgctgcttcctggctcctgtcccgcgcctggccgccccgccacgtcaccgcgcggccaagggt

SEQ ID NO: 49793 - DNA, 499 bp, Mus musculus
  source 1..499: mol_type = other DNA
aagttgggtggcaccggcggcctagcccagcctgccctccccggatagggtttgcaaatcctagcctgtcaaaccctggcaaggcgcccacctcagaaaggactctgggaaggtgtggcctcccagagatagggtgtcttatccaacatggctgcggcgccagcgcggctgtgtggccagcttggggcacacggcagactctctgggttctactgcccagagacccggaagtctgacgcacaaggccggcctcaagcgccgggttgagctcgatctcgactgcgctgacccgcaatagtgggcgggccaacgacgccaacactgtgacgtcgtgccgacggctcgccccacccccagccaacgttctagagctggcggtgcgagaaccctacgccggggcccccatctccgtcaccgacgtaaagcggttccgagaatgtccgtggcgtcgcgcggagccctccagacgctgtttacgtagcgtctgggccgtgcgtag

SEQ ID NO: 49794 - DNA, 373 bp, Mus musculus
  source 1..373: mol_type = other DNA
tttcaagtgaacaatttccattcgagaagacgggcaatgattctgtaaagtaagcattttgaaaagctatagccttttaaaaaactatccacgggagataggaactgttttggaatttattccatttaaaaggttcaaaaagaatatactaagacacttaaagcaacctctgcatgaactgtcagtttccatctaaggggaaaaggaaactcgtgtgtttctgtagatagggagaatgggttacccagctaggtatgaaaaccagaaggctctcccgtgactcagcaactcccttcgcaagggttctctaccccgcctacagcccgagccccgcctacagccccaggccccgcccatcaagggggcttgctcc

SEQ ID NO: 49795 - DNA, 417 bp, Mus musculus
  source 1..417: mol_type = other DNA
tccccagtgtcccagcaactagcacaatcaaatgaaccgtttctcaagacgcctctcagtctgccggcctccattctccgcgaagttgggtggcaccggcggcctagcccagcctgccctccccggatagggtttgcaaatcctagcctgtcaaaccctggcaaggcgcccacctcagaaaggactctgggaaggtgtggcctcccagagatagggtgtcttatccaacatggctgcggcgccagcgcggctgtgtggccagcttggggcacacggcagactctctgggttctactgcccagagacccggaagtctgacgcacaaggccggcctcaagcgccgggttgagctcgatctcgactgcgctgacccgcaatagtgggcgggccaacgacgccaacactgtgacgtcgtgc

SEQ ID NO: 49796 - DNA, 562 bp, Mus musculus
  source 1..562: mol_type = other DNA
ctgggaatcgaatcccagttagttctctgagactctgagacgtcccttatttataatcacgaatgataacagccgctttcatgtttacaaactgttgggacatttgatgctcaccatgaccctgagaagtagatcaaattgtccccctttattgcatcaggctataaaatacattctcttcattctgacaaaaaataaaggaaggaagcatctttggttttcacccaaagagttctgtacgggttaagaggtgcccgcggagcatgccacggtccagcctgcccgcttctccaggggtacccgggcatccccggatatccgcccgccgctcccagaggtacctgtctgcgaagccggaatcccgagctagcctgcagctttctgctgcccaggccgcgtcaaccgccgcgaccgcgattggccggcgccgggcaaccatcgtgcgcatgcgcagcctctctggcttctaccactgagaatgcagagggagccagctccgagacgagcctccgcgaagcagcggagcccctgcggactctctacacatgccttgggcacgact

SEQ ID NO: 49797 - DNA, 398 bp, Mus musculus
  source 1..398: mol_type = other DNA
aaacttctagaatgatcgcaactttcaaaacccactaggcagccaagaaacgcctcctggatggcaggacttgaggaatcaagactggcaggagccagtttgctactggcaaagcttcggcagaagcgtcagggcgggttccgccaccagcccctccagtgaccggaccaagctccggatgtccgccagcatccgcggcccaaggggcgcggtttgctttgtctttcggcctgctttgttgccaaggaagtcgtgcccaaggcatgtgtagagagtccgcaggggctccgctgcttcgcggaggctcgtctcggagctggctccctctgcattctcagtggtagaagccagagaggctgcgcatgcgcacgatggttgcccggcgccggccaatcgcg

SEQ ID NO: 49798 - DNA, 307 bp, Mus musculus
  source 1..307: mol_type = other DNA
gcagatttctgagtttgaggccagtctggtctacaaaggacagccagggctacacagagagtgggctttaagccatagaaaatctttattagctagcctagcaagcctttctcagagtgagcttttaagcacacactcgctgaccaggacagcccagggctatacccagcctgatcaaggccagcctggtctacagagcaggacagccagggctagacatactcttacagtcagttgaaattagaggagacgccaacgctttctctctagccagcccggctcgcttccggaagacgctctgtccagg

SEQ ID NO: 49799 - DNA, 319 bp, Mus musculus
  source 1..319: mol_type = other DNA
aatactgttgattggtgatcatgaggattagagaaaccattactttgaaagtgcaaatctgttgttttccctaacctgtaaatagtctgcctttggacacaatgtactcagaaatagaactcaggtttccatttgaaatatgactcccggcgagagtcttgccctagcactctgccgggaggagggccctgcggcgtccaggcgggagtgggcgccggggcggagctgcggcgaagcgacaagtcgacctcccccgctaccgcggagaacgtcaggggtgacgcagcgcgggggcgtgtctggggcgcgcgcggagtga

SEQ ID NO: 49800 - DNA, 273 bp, Mus musculus
  source 1..273: mol_type = other DNA
tctaaatttttcagacatttgaaacgggttggactgggactttccacaagtggcaactgaaaaattgtaatattaccactcctggaatacatagcatcgattctactatcttagggaggacaagattgggtcccgcccttcgctcccgttggcgggaaggatccaggcaggtagcgtgcacgctgtgttggccccactagaggtgggaccaaggctctcattaattattcattaaagtattttcttctgtgtctccgctagagatacgtgaca

SEQ ID NO: 49801 - DNA, 392 bp, Mus musculus
  source 1..392: mol_type = other DNA
atctcatcatccttagaagctgcccaccttggaatttaaaattcaaccttaaaattaaatagtattaatcttctagactctgggtgggttctttataagaaacaaaaaaaacttccacggacctgtttccctcgtctttaaaatgggcagacacggctgacgtaaccacccgcgcggggccgcgtcaggaccctatcctactaaagcctttagagctccggcgccgcgcgcgcgtgggcacggatgcgcgagggaacgctcgggtcccacagcctggaggtcgtactcgcccccgcctcccacgcgcggactacagggcccacgcggagggcgggccgagccggagcctttgggcggcagagggcggggcgggccggctgggcccggccaat

SEQ ID NO: 49802 - DNA, 325 bp, Mus musculus
  source 1..325: mol_type = other DNA
atagaagcacgcggaaacgttcattaatgattgcatgatacgcatagaataaatgtttagattatggggcattcaggttccagacaactgcatctgatggtacaggtgtctcccagcccctgggacaaagcaaccctggagggtttgcacaaggtccactgtgttgcgaatcaatgagacagtcactcactgtaaaggactaaaacactgcatttgtcattttcgatgtcgaaaactcccagggcaatacagctttaagaagtttgtgtccgcagctgctccggcaggaataagtgatattgtgtcaacgtccggtgacgggacg

SEQ ID NO: 49803 - DNA, 463 bp, Mus musculus
  source 1..463: mol_type = other DNA
ggggttcttccagctcaggaatccatcccaggcagagacagcctgcagaacatttttaacgtttttcattgcaaagttaattttcaacagaatatatatactgacagaggctgcagctcggagcagagcgaacctgctcttctggaacacagcagaaacagattaggcctaggagcatgttcaggctgaggctctgagcccagggccctcctgaactgcaaccgaggctgcagcgtgctgaggccagagccccgcagggacacagctatgggcattccggggggcgggaggacccggagaggaccagaggccaggacgcagggtcgccttagttctgagtgagatgaagccctgggcgtggcgcacgcagtcgggctcccggcacggaacgggtgcggggctgggcttcggccggccccgggggagcgagtggggcggggccgccgcgcccgccttctcctcc

SEQ ID NO: 49804 - DNA, 682 bp, Mus musculus
  source 1..682: mol_type = other DNA
tcccctatcctggggaatattatcctggctctaagtcacaccccggagcgcgcgagctaaaccgtaccccataactgtgacaggcagcggtggcgcaggctgagaacttccagtgccaggactcggcctgtggcacagccctggtccggtttggggctgccctcctccccggaggctgctggggaagtcccgcctggggacagcgccctccccgtgaccgcgatgcgtcagggcgccggcccgcgagtgtcccggggcgtgcgtcgcgcaggggctggagtggcccggcctggccggacagggaggcgcaggcccgcgctttggccggacggcgacccgggtcaggcgggcgcggggccgtggggaggcgggcccaattcccgcgtcggagtcccccgggcggcgccgcgcactgggccgggccgggcccggggctggggctgaaacgcgcgcggagcggagacgcgggacggcgcggggtcggtgagcggacaatgcggccggcagaggaccgcgctgcgcgagtggggcagggcggtgcgcgcgtggattggccgggcccagccggcccgccccgccctctgccgcccaaaggctccggctcggcccgccctccgcgtgggccctgtagtccgcgcgtgggaggcgggggcgagtacgacctccaggctgtgggacccga

SEQ ID NO: 49805 - DNA, 574 bp, Mus musculus
  source 1..574: mol_type = other DNA
gattaaataatttttcaatgttgccctcccaggagcaatggcggagtcatttgctgcctgcggcctgaaaatcccgacccaaagaaagactgctttggactcaatcttataaacaggtgttgagaccatggtcgcaggcctgggtcacctctgcgaaccggttacaaaaccacactcccacgaatacataaataatggatggggtgatgtgttaaaatccccacaaggcctggcaaagctgcagtgaatgcatttctgctgtttgcaaacgtctgcaggaggatgcacagcgcctagagactcctgggcctatcgcagcactgcacccatcggtctcccgccaggactgcgggggagaggacaggcccctttaagagccttcgcgcgcccccgccccgcgagcgctcattttccctagcaaccgccccgggggagggggaggccctggcaacggcgctcaggcccggagcatcacgtgacggcccgcagctggaacgcgagcgcgcgccccgccgagcgcccgcccgccgggggcctgagcgctggggcgcgtgcgcgagcggtgcagcaccgg

SEQ ID NO: 49806 - DNA, 328 bp, Mus musculus
  source 1..328: mol_type = other DNA
tgtccatttgttttccaagacagtagaaaactacccctacaggaactggctactgtgcccagagcctctgtggagagcaccgtgtatacctgcacacgtgtagttatttcggtctccctcatgcagggaaacaagcttggatgacgggctctgataccagctcggccacctgctgctggctgattcggagccatcaaacctgtcccctcccctcctaagccgaagggagaaaattggatggagacgcctggggccacccttggggcgcgcgggccgctgtacagaggagcaggagccctcccattccgggagctgatgcaggaagaag

SEQ ID NO: 49807 - DNA, 257 bp, Mus musculus
  source 1..257: mol_type = other DNA
cagagataagccccattcttgatccagcctggggtcctcccaggccaagactcttatttattgtaagtacactgtagagccaccatgtggttgggacttgaactcctgaccttcagaagagcagtcaggtgctcttactatgaagccctggctagcctggcactcactatatagttcaagtaggactcgagactataggatgggcacagtatataactcgggcgcccatctggaagccaggggttgatgaactcagg

SEQ ID NO: 49808 - DNA, 332 bp, Mus musculus
  source 1..332: mol_type = other DNA
tcaacagactcaaattcagcttatgctggcatggcagcgcatgctgtgtgccaggcgacaagcaaggagattagactcaatggaatctaagctgccaggtcaggggccacactcctggccttggtcctggccctgcagacaggcccctaaacaggggctgctctcagagactgccccctcccggcgctgactccgggccaggagaggaaaggctgtctccaccgaagggtggcaacttctcctgcagccgggagcagcctgcctgcctcccccgctgcctccctgagggcttccctccggccgccagctcgttgcaacgagaaagccggagc

SEQ ID NO: 49809 - DNA, 432 bp, Mus musculus
  source 1..432: mol_type = other DNA
caggctgttgtgggatctgcagacgcagcgcctagcctggtccctcagggaagggcgctcaactcagaggcacctgttcaggcctgcttagactacgtactccgggtggaccctcctgccgcgcggacccggccggaccttgtctcctttgtaggaaaggatccaaggcataaagtactacctccaactttaaaggttttgtcttatttctgaataaatacttatggttagcctgcgtgtacgtatgtgcacactgtgtatgagtacaagagcagaagtgctatttatttgtgacagggtcttacatagctaaggtagggggacttgggaagactgatcagccaggagcatcagacctgctgccagctgcccaatttggtcagcagtccggcagcgagggggcggagctgaccctctgggcgctttcagagg

SEQ ID NO: 49810 - DNA, 423 bp, Mus musculus
  source 1..423: mol_type = other DNA
tttgttgttattgttggaaatttttaaaggttcaattataagtagtttaaaaaaatttgagtatactgtagctatttcctcactgagggcatcagatccctgtacagatggttgagagctctacgcagttagtgctcttaatcactgagccatctatctctccatctctataagcagtttttatgcattttgagataacagcagcatagcatgcgctgctggcctcaggattattaggattacaggcctgagttgctaccatacctaggttcaaggccagcctggtctacagagtgagttccaggacagccagggctgcacagaagaggagccgcttacctttgtcccaagttctagaacagagttcctaacaggccagtcactgacattcagggtttctacctgacaacccactggtgagtg

SEQ ID NO: 49811 - DNA, 360 bp, Mus musculus
  source 1..360: mol_type = other DNA
gaacagtcagtgctcttattaaagatttatttttattttatgtatatgagtacactgtcgctgtctccagacacatcagaatgaaaatgtcacgcacgcccgtggcgcacattcgtacacacggggggacacatttgtaaatctgaaattaagaattggtgatcacatcaaaatcatagaagtgagaggaagcacaatgcctccatttttcttcattatcatgaaatttggctgctgcagaacgccgtagttctttacattctaaacctcagcgtcgacgagggtgggcgggaaaaatgtgtgtaaaatgacattcgatgcgcgcccttcgacccgacgcctatgcgtcaacacgttcgc

SEQ ID NO: 49812 - DNA, 385 bp, Mus musculus
  source 1..385: mol_type = other DNA
ccagcactcaggcaggcggatttctgagttcgaggccagcctggtctacagagttccaggagagccagggctatacagagaaacagccccaaagggccaactatgttggggttgggagggtattgaccacctactggcctttggatataaacagaaataagtacataattaattattggattaagatcaaacggagccccttccctttatttgaagcttccgaaaggcggctgcacaggtcaccccgctggctgggagcgcgccccacaccgggaccccaagaagcacccgctttctgagcgcgagcttcggggagctgcacctgccgtgcacggacgccccctggcgggagccccggcaagcactagccgagcgcaggggaggg

SEQ ID NO: 49813 - DNA, 422 bp, Mus musculus
  source 1..422: mol_type = other DNA
accgtttctaatgggacctatgggatctggtgtgtgaagacagttatagtgtactcatacataaatacacaaatcttttaaaaaaattgatactggattatttattcatttaatgaaacagggtgtcatataggtatattaagggatgggattacaggactcaaatttataatggcactggccagtcacgccaagtggcctgcaattacattgccagtacccataaatttaacttctgagaatttacaactactcggaattgcagtcttctccaaatctaacttcagctagtttggcattgggggggcaagagccgcgcttgctcaaggcgcctctgctgcgcctcctccgctccgccgggggcgctgtggataagctccgcggcagcccgagccgctctagcccctcatcccgccactccg

SEQ ID NO: 49814 - DNA, 207 bp, Mus musculus
  source 1..207: mol_type = other DNA
gactctgatagcatgagagatgactttcagactcaggcctgcctctcagatgagccccaggcagagagctgagctgagtggcccagatttgccagcaggcttcagaaagctcagcatctgcctaagcccaaatgctacagctggcagaggaattctctgctcctctgtgcacatagaggccaatttcaatgcgaagcctcctagcct

SEQ ID NO: 49815 - DNA, 392 bp, Mus musculus
  source 1..392: mol_type = other DNA
cccattagggttgaatcccagatccagacggacactgtgtcgaccccccgcacaggacgcccgggcagtgggccggcgcacgcacggtcacaggcagggcacgcgcacactcgcgcgtccgattgccgcggggcggtggcgggagctcgcggtccaggcgcccctggcccggagcgcgcaaagcccggctggcgggggaggggacgcggccgcgcgggggcggggcgggggccggcgggagcgggcacctccagcgcagcgctcggcctcgccgccgcgcccccgctaccgccccggggtgcagtcaagcggccgcgccgggcccgcgggacggggtggaggtggggtggggggcggggatcgggccgggcccgggccgcgctgcctgcgat

SEQ ID NO: 49816 - DNA, 515 bp, Mus musculus
  source 1..515: mol_type = other DNA
atcccagattcctggctgaaccctgaggtttgcatcagtgtgtctctggtctccaaaacaccacagatatgtgggggctggaagacactttaatgtttagcccccattatacggtaatcctaaggtctcccccagagggaaaactcgtctacttaggagactgtcccgtttcacaaactagatttatttgggtcacaaacttctttctttaaaaagcaaagtagggcggcgagcttggacccactgtgagcctctgcagggctcacctctcgcaggccagacgtaggcagcaggtggagggcgacgacttgcggctcctcccttgactgcacagtaacgtcacctaggaggcggggctgcgtctgtgggcggggccccacgacgggcagcgctggactaagttccgggctccgcctccggagggaggctacggaggggccgaccggaagtgcttccgcctccgcccgcctccgcgctccctgtcgcgtctccgtcggccccgcgagcgaggtcgt

SEQ ID NO: 49817 - DNA, 404 bp, Mus musculus
  source 1..404: mol_type = other DNA
ctatggtacccgagcgctagggttgggttgtacaaagtaagtggcaggcactgtggtgagtcacttaaacagaagtggaaactctttttaagatttccaggctggagttggaaagagcctctctcaatttatggtgagccgatcacttaggcggcaggctcactcatcaggatgacttctcaaaccggcagtgagggcctctaggcatgtttccccggttcaggggaaatcgctgaaccgtccctgtcccaggactgacttccagcccaaaggtcacgcctggaagctgtttgctcggtggacaagagatggcaggtgtgacagtctggcgcccggaacctctgccacgcctgggccaatcagctcgacgcgcgctccgacggcgtctcgcgtgataacctggc

SEQ ID NO: 49818 - DNA, 253 bp, Mus musculus
  source 1..253: mol_type = other DNA
caaaccggcagtgagggcctctaggcatgtttccccggttcaggggaaatcgctgaaccgtccctgtcccaggactgacttccagcccaaaggtcacgcctggaagctgtttgctcggtggacaagagatggcaggtgtgacagtctggcgcccggaacctctgccacgcctgggccaatcagctcgacgcgcgctccgacggcgtctcgcgtgataacctggccccccgtaggatcacgtgaccacagtggg

SEQ ID NO: 49819 - DNA, 431 bp, Mus musculus
  source 1..431: mol_type = other DNA
gcagtaaactcattgcttaataacataaacagtattttgcagcaaatagctgtatttttcaaaacaaagcactttattttgcatgtttgcaaattcttgctatgtagcccaagttagcctggaactcagagacagtgcacgggaccggtgtaatgctttgaaggtcatgaaaactgtctaagcccggacagcctaggctagatgtatccttgtctaaaaagaaagtagaaagaatcacttcttttgcaggaactcagtctattccacatggcccctggacagaattgaccagtaaggctagaagtcgagtctgcccgcccacctccggggctataggaaagccattgagaggcagcacttccgctcgctgcggaaccctgagctcctgctccagtttctgccgaggagcgaacaccgccagggcggaagta

SEQ ID NO: 49820 - DNA, 320 bp, Mus musculus
  source 1..320: mol_type = other DNA
tatggaccggggagcacccacttcatacatggggcggctgctctccagcagagcgacctctggccagggtcccagggacctttaatctgcttatatacataggaaccaatgacactccttcctggagtctataacccatgcgggtgcccatttcatggtctctcagctgcccaggggtgaggtggaagattgaccttgcagctcatctgctcacctcgttttaaaaggaggtaggattttcctatgctggtgaccccctcattgagggtcaggaccctccccagcggtgcgacccttaggaggtggctgcactcccgggg

SEQ ID NO: 49821 - DNA, 255 bp, Mus musculus
  source 1..255: mol_type = other DNA
aggcctttgcgtctcctttttgtgtgtcactaacagttgggtcaagatttgtatcacaagctaagagttaaatgggttggctacacttagcaagcggtttcttgaacatcatgattgaccagggaagactttaacttttatgtgaaaacaggctttttccttgaggccagcagcattatccaaactcagaagttttcttgtgtgttcaactctagcagctagaaaaaggctcacgcccagctctgcgcagcaggg

SEQ ID NO: 49822 - DNA, 199 bp, Mus musculus
  source 1..199: mol_type = other DNA
gggttcacaaaacgcttgtggagtcagggaggtatttgtagttgccctaaagcacaggattgctgagtcagcttgacagcccagtggggctgtcagcatggtgttgttttaataaaacaacaggagaatttttaaaacatacattctaaatatagccatggtaagtgactagtgttgtcattgcctctttgaccaagaa

SEQ ID NO: 49823 - DNA, 286 bp, Mus musculus
  source 1..286: mol_type = other DNA
aattactgtttaatcagaatagtttctgtaaagaattggggaccgtatttggaataaaatacaataaatgatagtagttatcactgtcaactttcaataaaccaatggcatgggcccttgttgttggagcctgcacgtatagattccgttattagtgcaatctcgtctctgggtccgcgaccgaggaagcggcctctgggatgctgagggggtgtgtcccctcatgattggcgcaggccgctcagccaatcccagctcggcaggcatcctgcctgcggccaatgga

SEQ ID NO: 49824 - DNA, 533 bp, Mus musculus
  source 1..533: mol_type = other DNA
ttggttgctatgatctgaaaatattttgaatgtggagaatcaaaattgtacaaacaaaataatatgttaatgactaagaagattgtatttaatccaatgggaaacagcagatcctctggtcagctcctgggctcaaacatgtataaaatggaaaaaaatttggaggcctctgatctcagaactgggacgcgtcctgaaggccggagtgggtcaggatgctactaaattccgcaggcgtccggactagaacacgtgctctgggccctgcctgcgggtacccgcggggccgaccttccctgcactgatgggtcgcagctgggaggcgggcgtgactcaaaggccgcacgtgcctctgaccccagccgggctaagtaggccagagacgcagggcgtcggctgagccgcccgtgaggtccccgcaagccctgcagaggcggcggtccctctccgcccgacggccgcgcccgcaccggggcccgcgccgattggccgactggcgatcgctgggcgggccgaggcggacctcgcggcca

SEQ ID NO: 49825 - DNA, 358 bp, Mus musculus
  source 1..358: mol_type = other DNA
agcctccaatccaatcgaggaccttgggcgcaggtggtggtttatctgatgtacaaactattctggcaacagcctcaaattattattattatttatttttttttctctgtatagccctggctgtcctggaactcactttgtagaccaggctggcctcgaactcagaaatctgcctgcctcttttcagctttattctgatacaaaaactttgaattttttgttctcgattccggagatcgtctccagcgggactgcagtactccaagtgtccactagggcgccttcctggcgtcccttccaggccggcgttacacacggggcggggccttgggaggaagtcccgccccacgcacgccac

SEQ ID NO: 49826 - DNA, 267 bp, Mus musculus
  source 1..267: mol_type = other DNA
aaatttaacattctctctgtaggttaccctcagatatgactttcagggccctgcagttgaaaccttttgataaagatccctgttgtttcattgagcagtgttgccaaacagagctaggagcgacacctgtctccacctcctctcagcagagaaggtctctgtgcagagtgcatttgttcaacatgctatgtgcaaacacttagaacttatacagctctttgcttgccgcccacagcagaatgcggaaaccctgctgtgtcaggccac

SEQ ID NO: 49827 - DNA, 419 bp, Mus musculus
  source 1..419: mol_type = other DNA
aggactgccctagtgtattctaggtattcctagtttcctgatatttattaaaagtccatcaaattgcccagaagcatattaatatcattttattgtatcagttatttaaacaaactgcaaaagggataaatgacctttattgaggcatgaaataatttctacctgtaattgaaaaggttgggtttttttttcttcccgggaaagcaaaatgcccaaggactctttcacatatatgccatactccagcatgttcatagagcatttgaaacagattcccgcttaagtaatcagctttcttagctgtagagttttgaataaaacctgtcttcccatttttaagagagggaagcagtttctatgcccctcccctgcccctagagaggacaggaggggaggagccactgtccacgaacttcagg

SEQ ID NO: 49828 - DNA, 263 bp, Mus musculus
  source 1..263: mol_type = other DNA
tttttgaaacaaatgagaataacattcattctgcattcagaaaaaatgtgcttgtaagcatacacattgagttctcacggaaaccgtaagttccgggtttttatggatgcgcaaacgagtgactcaaaagagggcctgtgactgatggaaaactagattctagaagaagaccaggagttgcttgcatcacagaccgggtgcctggggtaccggatgggccagtcttcccgagcatgccccacggccaccggctctgcggcccg

SEQ ID NO: 49829 - DNA, 246 bp, Mus musculus
  source 1..246: mol_type = other DNA
tccccctttgttggggggaaggcaccgctttagtagataagtctctttaaatgtaggctacacaccagcagtttagaattttaaagttggaagtgaggccccggataaaatctggcagtccttttaccggaggagaaccgactctgcaggatttttgcattaaacctccaggctggtagctagctccgcgcgatgaagtcatctctcagttacctgatggggctagccctaacgcgctcccaggcg

SEQ ID NO: 49830 - DNA, 532 bp, Mus musculus
  source 1..532: mol_type = other DNA
aaccactctatagtattagtgttttcttacctgcagacctggaggcacccaatggtcgtcaggtccaggtgaacctccttgccacgagaagcctgcggattgcacctggatcctccaggttggagaaagcgctcgaccggtcggtcccaagggggagcagccagggcgggaacctagctgctccctagccagcacagccctgcaaggcggtgcacaggtgcacggtcgcactcgactgtcctgtcgagtgaccagggctttgagaccccagccccttgggaaaggggactgcgggaggcaatcccgggctcggagcctacagcggccggccggtccagggcacacgcggggccggtgggggagggggaccctgcccgaactctcactcaccgcctcgcctcctggcccgggctccgcggctcgccccactccggtgccagccgggacggtcgttcttgccgccggggacaccgcagacacgaccgccgccggctccactcagccacggaagctgcgggcccgcctgggagcg

SEQ ID NO: 49831 - DNA, 271 bp, Mus musculus
  source 1..271: mol_type = other DNA
gctatatctatacagccccaaattgtcagtttaaactttgagacgagtctcagcccaggttaatctcaaattcactctgtactaaattcttttaacaaaattatttagtgtcagaccccctggaactatacttgcttgggatgtttgctggtagtcatgctaagcaagcactaacaactaacagagactaaccaatttagtgtgcaagcacactgacagacagcattgctccgccccttgaccgatccggaccaatcgatgttcaggggcg

SEQ ID NO: 49832 - DNA, 390 bp, Mus musculus
  source 1..390: mol_type = other DNA
ctggcactttttgcactttcaattcacaaataacaacagaatgaaaggttgacttttttttgttttgtttttgcgagtcaagctagagaattactttaccacgaggctctgacatactcttgttagctaatgtcttagagaatgatttatcatttttgccttttaatacaagtttattaggcttaaaagaggcaatttattaggcttataaaggttttattaactagtgtgctaaaaaacaatttgaagttgacaaaaaacttactcataacaaagcattcatattaattgagattatactcgtctaagctttgaaaggttattggaaacatttagcctttctaggttcattgctttttagtgaacctatagtgactattctaaacaact

SEQ ID NO: 49833 - DNA, 240 bp, Mus musculus
  source 1..240: mol_type = other DNA
acattaaacaatttagtcaagtgtgatcgagtaactttgaagacagaagaaccacggatcatcaacttgtattaggctttctccaaaggaagaacctgaaggggacgcgctcggccccttccggcaggcgcggctcgcgggctttcttcccggggcggcgcagagcagtgacgtcactcgcagaagaaatatcttatttcgccgatattgtcacgggcagctacacttctagaaggttct

SEQ ID NO: 49834 - DNA, 347 bp, Mus musculus
  source 1..347: mol_type = other DNA
gaaaaacaatcccttagtaaaagctttgtcttcgttcacacccccataaagacttaactgcggggggtggggggacctctcgaagccactaagagccacgaaggggcctagggaagcgcatttcctcggtgtgcaggacgctcgggtcctgcctacacatcttcacgaaggcccgaggaggcacgatgccaggcccgggagcggctcaacgtgacgcggctgccgcgagaaccttctagaagtgtagctgcccgtgacaatatcggcgaaataagatatttcttctgcgagtgacgtcactgctctgcgccgccccgggaagaaagcccgcgagccgcgcctgccgg

SEQ ID NO: 49835 - DNA, 256 bp, Mus musculus
  source 1..256: mol_type = other DNA
taaaattttatgttaggtattgtaagacttaggcacgtccctcgcttagttctttacaaactgaattgcacaaagcaagacagggcctctcagacattaaacaatttagtcaagtgtgatcgagtaactttgaagacagaagaaccacggatcatcaacttgtattaggctttctccaaaggaagaacctgaaggggacgcgctcggccccttccggcaggcgcggctcgcgggctttcttcccggggcggcgcag

SEQ ID NO: 49836 - DNA, 293 bp, Mus musculus
  source 1..293: mol_type = other DNA
agcagtcagtgctcttaaccgctgagccatctctccttagatcttccatcattgttcttactatgaaaaataaggatatcttctttctttcttttcttttttaaatacactgtagctgtcttcagacaaatctagagcagtcagtgcttttcatttaaaaaagggtttatttatttattatatacagcattctgcctgcaaaatatggctcaggacttctagaagaccagacctaagtttcaatttttctaaataaaaacatagaagccagggtgcacaccttgtaatctgag

SEQ ID NO: 49837 - DNA, 567 bp, Mus musculus
  source 1..567: mol_type = other DNA
tttgttgtactggaactagaacacacaggaaatggtgatgtattctagtcataactccgcaaatttaggagaaaatcaagttcagccactacaaatgtactaatttaatcgtagcacagtaatggcatccccatcacctttcctgtgagaagataaaggcaaagtaatttcccaatctgaaattgataccaggccttggtaagccgggccctggctccgaagccgaccacggtcagcagaaggccggtttggagtttcgggtttccaaagaccagcccatgccctttgcaaccacggactcgggggcagctctgtggatctggaccagggcttaagtcctggggcaggaatgcgagaagcatcgagacctcacggacgttcccaccggtctctcggccccgcccggccccgcccggccccgcctcaatcactccagcctcctccccagctgagagagatggggaggaggggggcgggaaacctccgcctgcgcctttaaggggcgtgaccgcaggctccgccccttctccacgctcgcgccaatgaggggaggggtgcgggaggagg

SEQ ID NO: 49838 - DNA, 291 bp, Mus musculus
  source 1..291: mol_type = other DNA
aaaagtggccagtaaccactgtgcgtgacacaaaggtcaggacaactttgtgagaatattcctgttcctgtctgaattgaaagagggattaggcatttcaggcctccaatcccttgtttgaaatagggatttctgagttcgaggccagcctggtctacagagtgagttctaggacagccaggactatacagagaaaccctgtcacccagcccctccttaatggaggcggggcgcgggcgagcgcggaaccggcttccctgcggcatgattggcccgcagctcgggcgcagc

SEQ ID NO: 49839 - DNA, 322 bp, Mus musculus
  source 1..322: mol_type = other DNA
aagtctggccttgaatcctcacatggaggttgacatatctgagagtacacaagtgtctgtttatagaatgaaacaccatataatccattagaaagtggatatatggatatcctcagctcacgggctagacaggagagtccaaggactcaggcctgagccacgtgtgctgcaatggcagcctgtaactccagcctctgctcccaccccctgcccacaggctggggaagccccagctcggctgggctgcttacaatgcttcccattcagctcggtcctggctgccaagcccatgggcaaaggggggtgggtactgccggtggcc

SEQ ID NO: 49840 - DNA, 681 bp, Mus musculus
  source 1..681: mol_type = other DNA
agctgcaaggcagaggccccgccctcgccccgcctccggccgccgccgccgctaccgctatcctgtaagggcccggctgagtgcgaactgcgcggcggccgggaccgagacagtggttgggggccccggggcgcaaaggctgaggcgaccctcagtccccacccccaccgcagcccgggccggcgtcgacgcctaagggggggcccgcgccccgcggcgcctctgcccgccgtccgaggcggcccccgagccgagcccccggcaggcacctggctgccgggggggtgagggccagggaggcggccggactgatttctcctccccgggcttgcgagtggaggcggagaagcgcggcgcgcggagaggccgcgtcggtgggctcggcgtcagcgcgggcttgcgggcggacggccctgcttggcccggcccggcccccctggcccttcgggccggcgagctccacgctcggcgtcgtcgctgctgcgcctctgcttgtccgctgcgcgatgtgaggcggccccggcgccagtctggctctcggctcggctgagctcagtgtggccattaggggccggtgcggcagcggcggcgcggagcgcagcggcaggggcgcaggcccgggagggggcaccgggaggaggtgagtgtctctggtcgcctcctcctctccccctttttcgc

SEQ ID NO: 49841 - DNA, 306 bp, Mus musculus
  source 1..306: mol_type = other DNA
gtgatttaaccatcatgcttatgtggcccggcaggctcccagctatctgtacacaggagagtcttgtgcgtggactgctggcatgatagcacacacctgtaagcctcttttgaggactgaattcaagccagccagagatacacattgagaccctgtatatgaatgaatgcatgaatgaagaccagtaaataactttacttaaaaaaacaaaaaacctgttttccctgagttctgtgagttcgcaaattaattgaccccaggctctcagttcctgggatcccagtgtcctctcctaggaacctctga

SEQ ID NO: 49842 - DNA, 386 bp, Mus musculus
  source 1..386: mol_type = other DNA
ggtttctctgtatagccctggctgtcctggaactcactttgtagaccaggttggcctcgtgtcaaattatttgattaattttatccatttgaagaatggacagctcatattgatgttaatatgaacctctattacaaaatgactttctccatttttaaaaattatctttggagtttcctttcaatttcaggggaattagaatttgtttttaaagtcatttcttttagcaagtagatccctatcaatgctgaagtgatccagtgattcactgtttcgcctttgtcaataacttccgtcaaatacgagcgctctatcgcgcgcgtcccgccatgccagcgccggaggacaggacttcctttcccagtaggccccgcaagccggcccgg

SEQ ID NO: 49843 - DNA, 301 bp, Mus musculus
  source 1..301: mol_type = other DNA
tgaagagatggctcagccattaagagctgctgctctacagcgaattcagggctgagcccagtgtctgaataaaatcagccaggctttcttaaacaagtgtcttggagaacacctggaaagccaagtgtagctttacgctcggtttttccaggcatccctccactgggaaggggggcttgccgactcccccctcccccccaggtgcgcagcccgcgccgcccaccccgggcgcgactaagcgaggaggagctgcgctctctagagctgcagggagacggagcctccagcgggtgctgccgcg

SEQ ID NO: 49844 - DNA, 305 bp, Mus musculus
  source 1..305: mol_type = other DNA
ggtttgtcacttaggccaggcctgaatcaagttggcagggctgtcctttttggtttctctgtgtacctcgaactcagaaccctttctgagagaccagagacttgaagaattcccagactgggggagaacttccctttgcaaagttagataacaggccgggttggtgctgtggctccacgtgctgcagctggcacaaggccaggtccgccctgccaagcagcgagaagggaaggcctggctgctgccgtagctggcaggtggccggctgggctggggctgcccattggctgcctcaggctcacacc

SEQ ID NO: 49845 - DNA, 475 bp, Mus musculus
  source 1..475: mol_type = other DNA
cctaaggaacccagaaactatgttcaatgttgaattttccggaccctggttcgtcgctgaagcagcggagcttgggacccgcctgccctccgctaacctcgcgcggagcgtgggaggagcgctggctggctacccacgtcccagtcaggccagtcctggctaggcctaggccagagccagccccgcccctctccgtctccgcccctccgcgccgcagccgcacgtgcagagcctcgtgcaatcgcgccggccccgcccccgccccgcgaggctccgcatctgctgccgctccacgtgaccctcggggctgggccgtcgcgccccgctccgccttcctctgaggtggcttctccgagggacgcagaagggcccgacgctcccgggcaggcggagcgatactcctcacctgagagctgtgcccgcccttacgcagcgcgcaccaatcgggaccgctggcctggccttatcggaacca

SEQ ID NO: 49846 - DNA, 351 bp, Mus musculus
  source 1..351: mol_type = other DNA
ccgggcccgggtgcgcctcgcttcgccgccgccgggtgctgtagaaggagcgcggctctcatgctctcctgtgcgtgggtaacctgctccagagagctcgaggacctcagcagaggggcggcggtcgcgcgtggccagccctattatgaggttagcctacacccctggaggtggaaccggggagttcttggagttctcagggccccggtgatgccagcaacagccactgtgtcctccccggggttggtctacaccctttggagtcttaagctcagaaggattccgagggtgagcagccccgctatcctagtcccggccccgccccggctgggcggagggacgcatcacgca

SEQ ID NO: 49847 - DNA, 443 bp, Mus musculus
  source 1..443: mol_type = other DNA
ctgggggagcatggattccaccctgcctccaccctggaccaggctgccgctgcttaaacccaagcttgccggcgggcggggatgggcctgtgccagggacgccttgacggcctgcaaccgcgacaggtgcacggaacgtcagccgcgaatcgagcccgcctcgcctggcctcgcctacagccgcgggcaaggcaggaggctccccgcccccgctcgcttacctgcagccgggtgaccaggaggctgtaaggcgagtcaaccgcgagggtggggcctcctcccgcagccaactgccaactcggcgttcggcgcaacctgcaacatatgtagaatttttacccaagaacaaacttcagtttatgagttcaaatctggaagtaaagagaattttattcaaaaacctttagcgaggaaactctcgcgagatctagccggttaggtcg

SEQ ID NO: 49848 - DNA, 329 bp, Mus musculus
  source 1..329: mol_type = other DNA
tttgctttacaccaagaggatcccgccagccttagactcccggatgcgcgctgctgccctcttctaagatgcgcagaaaatcaaatctggatgatgtttagccaaagccggcggccggaagcttagggaacttccgcccgacctaaccggctagatctcgcgagagtttcctcgctaaaggtttttgaataaaattctctttacttccagatttgaactcataaactgaagtttgttcttgggtaaaaattctacatatgttgcaggttgcgccgaacgccgagttggcagttggctgcgggaggaggccccaccctcgcggttgactc

SEQ ID NO: 49849 - DNA, 477 bp, Mus musculus
  source 1..477: mol_type = other DNA
gtgtgcagcaagaaaatttttctattttgtttttttgtctgttcagtcctggttgtccagaaaaagacgtgtgtcaccatcattgttaggcacccccctttttctttttagaaagagtctcaaacaaacaaaaagtcttttgtacctcctgaattcagaaatttgctgcccggccacctggtattacaagcgtgaggagcataagactattttgaacgtgttaaatttgtattttcaaagggtctatctggctgttgtgcaaaagaaagacaatcaggcttgaagtgcagacttgtcgcctagcaaccagactcaggggcccggggttggcttgcttcaggatggggccccgccctttcggcactctaccccgcccctcttctctcacttgcgggagagtgctggcggccccgcccaccttccggccccgcccctcacgggagcctcgcgaagctctgcgacccgcaggggcgggca

SEQ ID NO: 49850 - DNA, 386 bp, Mus musculus
  source 1..386: mol_type = other DNA
cagggtttctctgtgtagccctggctgtcctggaactcactctgtagaccaggctggcctcgaactcagaaatctgcctgcagtcaacagacacacagacaccactgccccctgtatatgtgtgtgcgagtgtgtgtgtgtgtgtgtgtgtgtaagaaagaaacatacacagaaagacactcattattcttttatagttgagatttgagcacattcttcaatggagatctcagatgatctgaggggacagagctcagcacagctgcaggtccctaggaacctggcttgttcccagagggtctccataccttggctcacccagcacttggcctggctcacaaggtggtgtctgggccagaccctccagcacatcctgacgtcagcag

SEQ ID NO: 49851 - DNA, 340 bp, Mus musculus
  source 1..340: mol_type = other DNA
ggttaagagcactgactgctctgtggcttgcaaccaaaacagagcacctgtatatattaaataaataaatctctttccaaatatttatttattttatatatgttagtgcatcagatctcattggagtcagtgccttttttaaataaaagatttatttatttagggactctatagtatcacagaggaagatggtggtgccccatggcaatgatccgagaggattccacattccaaaatttcatgttacaatcgttatgagttattactaattattactgtgcttgatttataaaataaaatctaatgctcccataatctcggaggatgtcagtgctctgtt

SEQ ID NO: 49852 - DNA, 403 bp, Mus musculus
  source 1..403: mol_type = other DNA
ctgagttcaattctccttacaactgcttgtacctccagaactaggaatctgaagcaggtcaaagcttacaagttagagatttatggcatatcttagtaggttacttttgattggaaaaaaaaaaaaagcacatcatgttgttttaaaaaatactcttgttttgaaaaaacaaaacattttgtataagggcctctgcctcagaagggctggatcacaggtgagccagcacgccgggttctccctgagacttcaagctcaagatgacaaggcaataaccttgggaatcacaagcagaaggctctggtagggagcgccctgaggggtacgaggacggcgccgcaggccccgccccctcgcgggagggccgatggccactgctcctccccgtgctgcgcagctggcc

SEQ ID NO: 49853 - DNA, 260 bp, Mus musculus
  source 1..260: mol_type = other DNA
ggactcccactctgacatgagagacagacagacagacttctgggttctctttagatctgttcatatcattcattgctgcaacaacctccccttggctatcccttaaggatgctgcaggactaggagcatgacccaggtcctgcaggtcgacagcgctgctccgtggtgaggccaggggtcctgtggtgcggcgaacctaccttaaccgcagggcaccacgtccacgcgcgcacatgcgtgaaagtgcgtccccgcccctg

SEQ ID NO: 49854 - DNA, 523 bp, Mus musculus
  source 1..523: mol_type = other DNA
ggagccggcaagggctcaagccttccaccgctctctgcagagggaatttccttttggcgcggagggcagtcgctccgagggacaccagaggatctcgtctgcagtgttgcttccaccaccagggacacgagctggaggtatcctcactttctctactttgagctaaagaagcagggttccctggcttcttggggaatccaccaagatcagtcggctagccccagtctctagctgaagaggagcttgctctcagccggagtggatcgcccggtcccctcacccagcatgatggggctgagccggcgggccaggcccttggttggcggctccatcaggacccgtggcggcggccacgatggccctcgggcacccggcagcggcttggaccttccggtacccgaccggggtggggggggaccgagccggggcccggcctgagggcgggggagaggcggccctgcgctgctcgcgcccggacacccgcgaccggccaggggcggggacgcactttcacgcatgtgcg

SEQ ID NO: 49855 - DNA, 293 bp, Mus musculus
  source 1..293: mol_type = other DNA
ggcgggggagaggcggccctgcgctgctcgcgcccggacacccgcgaccggccaggggcggggacgcactttcacgcatgtgcgcgcgtggacgtggtgccctgcggttaaggtaggttcgccgcaccacaggacccctggcctcaccacggagcagcgctgtcgacctgcaggacctgggtcatgctcctagtcctgcagcatccttaagggatagccaaggggaggttgttgcagcaatgaatgatatgaacagatctaaagagaacccagaagtctgtctgtctgtctct

SEQ ID NO: 49856 - DNA, 283 bp, Mus musculus
  source 1..283: mol_type = other DNA
ggctagatccaaatagccccaatttggcaaagcaggtgtcctacatcagttcatgttgtggtgacccccaaccataaaattactttccggcggcccctgggaaagggtcttttgacacacactcccctagaaatcaacctccgcctgagaggatggttttgaaaagggtacactatccaggacagccagggctgcacacaacccgtcttttgccgatcctaactagaacctcttcttccgggaagggggcgggacgccgtcattgcgcgcgctctgtggcgtc

SEQ ID NO: 49857 - DNA, 521 bp, Mus musculus
  source 1..521: mol_type = other DNA
gataccctatctcaaaaaaattttttttaaattatttaatcagctgtgtggataatgcctataaaaactcaggctaagatggatcaatgtgaagcactcaggaggcaaaggcaggcagatttctgagtctgaggccagcctggtctgcagagtgagttccaggacagccagggatggactttattaaaaaaatcctaacaacaacaaaaaattaatataattgttgccaatgatagtactcctttaagaacgctagaaactattcctactttcttatattttaggctttctagaatcccttctagaactggccctgagtcatggatgagacttccctcactgtcctgggagtaagtttgagccaaggtcagggcaagctgaacaggcctggtttgtatccaacctgctatctagccatttgaccacatggaggcaaaggttggagctcctggaagaggcttcctccaccaagggcctgctagtcagtgacagaggcattataccccaaacttactgagcca

SEQ ID NO: 49858 - DNA, 314 bp, Mus musculus
  source 1..314: mol_type = other DNA
gatttctgagttcaaggccagcctggtctacacaggacagccagggctatacagagaaaccctgtctcgagaagcacttcacctcaagtggacacagcctgggctgcagactcagatgagtaaaagcgccgggcagcaagggtttcgggccgcggtttgctgacgcgctttcagcagggtaagggcccccgtgccgggcgacggcttctcccaggaccacgccgtggctgacagctgcagcgacacgcgccagagcacagcggggcggggccggaagtgaggtcagcggagcgcggcgttcgcggcccggtctc

SEQ ID NO: 49859 - DNA, 264 bp, Mus musculus
  source 1..264: mol_type = other DNA
ggcatgctggccatgtgccaggcaccccaacatgtggtaagcgtgtaaaacagtttccagtgaccaaggagccctggctgtcctggaactcactctgtagaccaggctggcctcaaactcagcctcttcctcccaagtgctgggattaaaggcatgtgctgaaaacaaaaaagcaaataatagcaacatttattttttttctttatcaaatctgacaactactttataaacagtggctgctcgcccgcgcgtcgtcggggcgca

SEQ ID NO: 49860 - DNA, 444 bp, Mus musculus
  source 1..444: mol_type = other DNA
cacaagaagctcttcctatgtatgccatgtgatgaatgtctttgaatacatgtacttaatagcattcctcggaacactaatcttttactgcaggagtggggcctcacctggagagaccatcagttgtaaaatgttcacaatgtgacttagggtctggatagcctatcccagaatgttagggtactatgattctacccagagctagcgccggacagcggtgcgttaactggagctgatccaacggaaaagtagcggctcctttcagaagaaggctgggacgaggacccggcggctactctccgctggcgcttggatgccgtgaggggcggagtcccgctatgcaaatctgagctgctgatcaccagtcgcgcgccgattggctaatgcaagccggggcggggctgcagtgggcgcggcccggggcgggggaattctgccccgccc

SEQ ID NO: 49861 - DNA, 477 bp, Mus musculus
  source 1..477: mol_type = other DNA
tgatgaatgtctttgaatacatgtacttaatagcattcctcggaacactaatcttttactgcaggagtggggcctcacctggagagaccatcagttgtaaaatgttcacaatgtgacttagggtctggatagcctatcccagaatgttagggtactatgattctacccagagctagcgccggacagcggtgcgttaactggagctgatccaacggaaaagtagcggctcctttcagaagaaggctgggacgaggacccggcggctactctccgctggcgcttggatgccgtgaggggcggagtcccgctatgcaaatctgagctgctgatcaccagtcgcgcgccgattggctaatgcaagccggggcggggctgcagtgggcgcggcccggggcgggggaattctgccccgccccttccgtggagtcggggcgcagctcaatgggcggtggcggcggtaccgcctccgcgtctccc

SEQ ID NO: 49862 - DNA, 398 bp, Mus musculus
  source 1..398: mol_type = other DNA
gccttggctgtcctggaactcactttgtagaccaggctggccctgcgggggagtggtggaatggggcattgagccatgcctcctcattctttccctaagcttgtgaaaggacctgggagtcccaggggtacaactggcctggtccccaggacctgctcagccttctatagcagaggccgcggaggggagccgaccacttgagggctctggccagaccagaactgggggcacatgctctggggcagaccagagaggggttgatcaaagcttgattctcctcattcatgtcaggaccagacacaggaatggaacattgtgagccccctcgagggcccaattccccggcgcagcggccgcgctcctccctcccgcccgcccgagcccgcgccgagcccgcg

SEQ ID NO: 49863 - DNA, 258 bp, Mus musculus
  source 1..258: mol_type = other DNA
acctgcagggacagggaggtcccttgctaatcctagggcttgctgaaagctagtgtggctctccagcacccgcgaccctgctggtccatggtggacctcaggccagaccccgtgttcccatgggtaggcggctacagggtccctctgctgtccaagagcaggctcgcagatgatgctcagctgtctgtcgtctccaccccagtggtcccaccccagcaggcaagggcggggcggaggatgctgcgtcgcggtttcatt

SEQ ID NO: 49864 - DNA, 564 bp, Mus musculus
  source 1..564: mol_type = other DNA
cctgaatttgcttccaatgggaaccaaatactgaactgcctctaaatgcagttccagagactctgactcccactcacatgagtccgcgtgcgcgcacacacacacatttgcacgtaatggtggctcacaaccatcatgagatctgatacccacttctggtgtgtctgaagacagctacagtgtacttatatgtaataaataaatctttaaaaaaataaatcttcaggctcttttaagagtggcggttcctgccaggcgtggtggcgcacgccttttggcggctcagaaagccccgcccggacatgcgtaccgcgccccgcccactagagaggcgggccttgcgacgagcgccaagctgcccgacctgaacagggctaccgtcttggtaggtgcgggcagcgcccctggaccggcttccccgcagccaaagccggtgcccttcctcagcctcagcgcgctccgacagcggggggcgggcggacgggcgcgttctctggaccaatcggagcggcggctcgcgaggctgagggacgcctccaccaataggcgcgcggctgcaccggc

SEQ ID NO: 49865 - DNA, 447 bp, Mus musculus
  source 1..447: mol_type = other DNA
ctggctgctcttggacccgtaacttgtttcaaggttgtgcacatggtgcacatgcataaaagaaaaaaattttaaattaaattgaaaatctttttttttaaatgcaataaatctttttgtagaacgaagacctgaatttgcttccaatgggaaccaaatactgaactgcctctaaatgcagttccagagactctgactcccactcacatgagtccgcgtgcgcgcacacacacacatttgcacgtaatggtggctcacaaccatcatgagatctgatacccacttctggtgtgtctgaagacagctacagtgtacttatatgtaataaataaatctttaaaaaaataaatcttcaggctcttttaagagtggcggttcctgccaggcgtggtggcgcacgccttttggcggctcagaaagccccgcccggacatgcgtaccgcgccc

SEQ ID NO: 49866 - DNA, 332 bp, Mus musculus
  source 1..332: mol_type = other DNA
ctttcttggtctacccagcaagagacatcctgaaatgttcagggtattatcttttttaaaatttattttgttttaaaaaatgttttcctttaagtgtaccgcatgtatgcaatacctatgctggtggaactggagatatagctgttgcaaaataagcaatagaacctatgtagaccaggtggacattgtctgtctgtccaacaaagacacaggagctcagggactttgtcactcaaataaatacttgttgaatgaaagaactactttacatccatccatccattcattctcactagtcaatcattcataaatatcagattgaatgcctgagc

SEQ ID NO: 49867 - DNA, 231 bp, Mus musculus
  source 1..231: mol_type = other DNA
cccagacacctgcagagcaggtagcatggtggcatgtttaggggactgagggtcccagagccacctcacctgggaatagaccctggggaacccggtcctcaatgccgcacccctgggtcctgaggagccatcggtgtccatggacccctagggggcaggatgtggggagaggcatccccggaagcaggctagcttgcctgccttggtcccacctcctgctatcctgaatgt

SEQ ID NO: 49868 - DNA, 303 bp, Mus musculus
  source 1..303: mol_type = other DNA
gtttcaacccacagagcgctctaacctctgctggggattaaaggccacacctcgcagcttgtgttctcagggttgatcaactagcaatgcatcaaacacctaggctgggagctgggtctggaacccagttcagaaccgcggcgatcaccgcgtgactcacgcacgcgcacggtcgccggcagctgccaccagcctcctgcgccctggacctggtaaggggctaggcagctccggcacccgctccctcgtgctggcgcgggagctgcgggaaggggaggggccctcggcgaggctggcctgcgc

SEQ ID NO: 49869 - DNA, 319 bp, Mus musculus
  source 1..319: mol_type = other DNA
ttattatatacattgtaggtctgtcttcagacacaccagatctcattacagatggttgtgaaccgagcagacagtgctcttagcaatctagtaagtctttgcctttaacccatgtcttacaatgataatatatctattatttgacaattttcatttcttcactgacacaataacactctagaatatcttgagtaatagaaatgcatccaagaattggacccactgaaggttgaaattcactgtcgactcgatggaaggaagctctggtcttataagaccctcagggttaatggctactttttaaaccactagctcctag

SEQ ID NO: 49870 - DNA, 316 bp, Mus musculus
  source 1..316: mol_type = other DNA
cttaccagcccacagagctgagttttcaggtttggctgccttggccattaccttaacatatgaataagtaatgaataaatacatggagggggcagcctcctgacctttcgagaatggttccaggacacactgtctcctctgtaggaattcactgcacagctacttactgagcacgggcagtgcgggccaccacccccgccctctggggcggaggacggaggactccacggcgcgcgcacagggcgcccaagccgacttcccacgggagcgcgcctcgggaacgcgcagccgcctcccgggtcgctataggtacaag

SEQ ID NO: 49871 - DNA, 271 bp, Mus musculus
  source 1..271: mol_type = other DNA
acagcctttgaaccagctgtgccttctgcttagaatgcacttctagatatgggcatagccgacaccctcatttcccttaatactctagtggatactactagttgaagaaaagttagtaaaatgtagggtatgcttgtttacattgtgaggtcagggaggagacctcagagcggacagctgagaccttgcattcagggagccttccctgcaagcctcctcaggaccacaagtggactgcagacctgccaaagacttggttgagaaccttagc

SEQ ID NO: 49872 - DNA, 349 bp, Mus musculus
  source 1..349: mol_type = other DNA
tactctagtggatactactagttgaagaaaagttagtaaaatgtagggtatgcttgtttacattgtgaggtcagggaggagacctcagagcggacagctgagaccttgcattcagggagccttccctgcaagcctcctcaggaccacaagtggactgcagacctgccaaagacttggttgagaaccttagcggaaaaagagcactccttattcggttcgagacgacccctcacctcctgtggcgcaggcatccccaccttccagggccggtactgggcggggagcggccggggcggtaccccgagcctcccgggcggggtctcccggctcctgcggccacgtttgcgac

SEQ ID NO: 49873 - DNA, 205 bp, Mus musculus
  source 1..205: mol_type = other DNA
gtaaggacacaacaaaagtgtctttgggcctaggttatttctttgggttaaaaaaaaatggatcttgtttgatcttggaagctaagcagggtcacccagaagagctggggctccgtgtgctcagggctcctgctcagctcagaagctgaattcagggcagcctgggctatgagactctgtcttcaaacaaacaaagcaccatgtt

SEQ ID NO: 49874 - DNA, 540 bp, Mus musculus
  source 1..540: mol_type = other DNA
gcaggacctggtggaaggcctgttagcctcccctccccccttccctttataaccagaacggtaaagttcccatccttcctctcagaaagttaattttggttattacaatcaacgtgtttacaaatgaagaatcaggagcctgagttgcaaagctggtgtctgaggcgaacctggcttggtggtatgacctccattccactgcacccattgtaccaatgtccacagaaaccatcagctttttgttaactttttgttaccttaaaaaaaaaaaaaaaatatatatatatatatatatatatatatatataaattcagataccaagtagagtttttcattacacattctggttccttaattcaagtggtgaggggcgggaacacctacaaagggagccctggcggccccgccctctggagtccgggaggggcgtccttctcctgacgtcactacgtcgtccgggcgccgaggactttcccaccggcatacgaatgcgtgctctgcgcaggcgggagggacgctcgcgagttaaagtttctgcc

SEQ ID NO: 49875 - DNA, 407 bp, Mus musculus
  source 1..407: mol_type = other DNA
agatatagcttccatggtttgggatgtaaaatccctagtcatgcctcagtgagtgcttaagcactctaactgctctgccaaaggacctgccagaggaatccatagccttcttttggcctccatggactccaaaaagcaagctctgaggccagcctggcttttgctgtctacaagaaaacggttttccggaagcactgctcagcagtacgcactgttgctgcggaaagactgccattgccgcctggccggcgcctggcccgctgcctgaagcctcgacgctgcgcctcctggtggttcctcagcgccgccgttgaacgagccaaccccggatcggtgtttccgcggtagtccttccctctgcactgcaggaggcacggcagcgagtcccgtggcaccgcgcgtgcgca

SEQ ID NO: 49876 - DNA, 319 bp, Mus musculus
  source 1..319: mol_type = other DNA
gatagcatgtttatatgttttgtactcatgaattctatgcatcggttttcaggcattatctggaaatgacctgcttactacttaattcccgaaggacatttctttattcttaacaaagaacatgtggatgatgttcttcaggatgttaactcttaataagggtgaagctcactgtggtccctaatccctctgggagcacaagctaagtcccagggggctctctggggaccttggacctgtcagggctgaagcctcctgcagtgcctcctcccaggaagcacctcccgggagtggatccgcctcctcagagtgtggaagc

SEQ ID NO: 49877 - DNA, 319 bp, Mus musculus
  source 1..319: mol_type = other DNA
ccatgtgtccagcagtgcccagcacacaagggccatttattagaaggctcgaccctgaccacaggcctctggcatgaggaaggaaactgacctccatgtgaaaaactgttcccaggtgagattgaatttttctgctttcccagactggtggatgaccacagacctgtagtgaagatggcaaatttgcatgggtagcataccaaatgaatttgctgcacacggaagacagctgcctaccatgttcagcccagcagaatcagcatgctctgctcctggagggcaaccctggcactcctttataaggtggcaggatccttat

SEQ ID NO: 49878 - DNA, 319 bp, Mus musculus; identical to SEQ ID NO: 49877
  source 1..319: mol_type = other DNA

SEQ ID NO: 49879 - DNA, 292 bp, Mus musculus
  source 1..292: mol_type = other DNA
ccatgtgtccagcagtgcccagcacacaagggccatttattagaaggctcgaccacaggcctctggcatgtgtgaaaaactgttcccaggtgagattgattttctagcttccccagactgggcctgaactggatgaccacagacctgtagtgaacatggcaatgcgaggcagatttgcataggtagcataccaaatgaatttgctgcacacagtaatcagatcatccatcttgaagaggggtgttcagcccagcagaatcagcatgctctgctcctggtaggaaactccttt

SEQ ID NO: 49880 - DNA, 241 bp, Mus musculus
  source 1..241: mol_type = other DNA
gaaggctcaggagtcatcacctggccacagacctctggcatgaggaagaaaactaccttacgtatctccagatggaagactcttgccaggtgagattgagcacccattggggctccagtgacatgatgccagtcaaccctcatgtctgccaggaaagtgctccatgaagatctaggaggtctcattcctctctgagttcctgcacacaatgatcagaacataaactcctgaaaggaactga

SEQ ID NO: 49881 - DNA, 282 bp, Mus musculus
  source 1..282: mol_type = other DNA
caactaaagttacctgactgtagccaggtatacaaaaccatagactgtctttgatcctcaaggcctgccatgcttcccctaaggaacctccttcggaagggcacgaccaaggtggggctgaagctggggtccctggcttcctacaaccagacacccacctggggtgagcaccggaactctggcgggacggcatgggtagcataacaatgaattttctgcacagaatgatcagatcatccatcttaggaggcccagcagaatcagcagcttctggaagaaact

SEQ ID NO: 49882 - DNA, 293 bp, Mus musculus
  source 1..293: mol_type = other DNA
agctgctatgtgctgagtgccctgcagtgcccagcacacaggtgctgttcaccctgaccacaggcctctggcatgaggaagaaaacttctatttatctccaggtagaagactgttcctgacatgtccccaaattaggagattctcagatcacttctcagcttcctcagactgggtctgagaaattctgtagtgctccatgaaggtctaggagggactgcctaccttcagcccagcagaatcaacatgctcagctcctggaagccctactcctttataaggtggcaggatccta

SEQ ID NO: 49883 - DNA, 253 bp, Mus musculus
  source 1..253: mol_type = other DNA
ttagagagcctatctaatagggttgctctggactttgatcttcagagatctggatccagcaaggaccagcaattcccggcacaggttctcagaccattgctcagactgggtttgagaaatcccataagatgccacccttgtgtcctctcaacaaagtgttctgaagctcccaaagctttgaatgtgaattgtatctgaagatttttcagcactcaatgagcagaatcagcatgctcagctcgtggaatgtgat

SEQ ID NO: 49884 - DNA, 317 bp, Mus musculus
  source 1..317: mol_type = other DNA
aaccagacagtggcacttgctgtcatagccgggtgctgtgtcttgcagtacctgcaagttactggcgttggcagtattcacaaatatctcactcttaagatgattgttagcacagggcttgacctggtccccatgtgacaactacatggacatctagctgggtgctcaaggctccacaggctggagcctcgccacttcagtggccattgccactgaaggccttgttattctgagacaactatgaccgttgcaccctgaggcagggtccatggctagaaagggcaggaacctctgatgttgacttcctctttataagg

SEQ ID NO: 49885 - DNA, 315 bp, Mus musculus
  source 1..315: mol_type = other DNA
cataataatgtgcattcaacataagctagactgctattaatagtgtgcgttttctcttcagaagcttccaggccatgtaaaatcttttataaaactcttcactaaggctgttaacataagggtccaattatcattcaaagatcagcctgttagataatagctcaaaaattccatccatttttatagcatttgaggaagagagactcagagcctcgccttcgtggactccgcgggaccctgcgccctgccctgctcaccgcggcgggggaggggagagcgccccacacaggaagtgcatcctgcgcccctagctcg

SEQ ID NO: 49886 - DNA, 483 bp, Mus musculus
  source 1..483: mol_type = other DNA
cgatgatgacatgatgtccatgacgctgtaagccagagacaggactgtggttccctgtaccaggggctggagcccctgggggccactttttctgaatgtgaagaaggctagtagtaggtctgtacatagtaggggcttaattgctcggagctagtccacctacttggggcagaggtgcagttggaggacaacctcccttgacgccctttgtgtgagtgtgtgtcaatagcctgggaaatctcaagatgctaaaggctgcccagctggctctcagtgcacagtatactgtgagtaagtaggcattcttaccttcagccctaagctttgatggggccaattataaatagacacataatcgcccctatctatagagataaaacgtattctttagggcgaaggagggatctggtactcctctccctcacatctccaccctgcagaggtgtgatccggcaggggccgtgatgtcagaggctcagctga

SEQ ID NO: 49887 - DNA, 672 bp, Mus musculus
  source 1..672: mol_type = other DNA
gtactgccatctaaggcagcagttccaacctaggcgtcgggacagctttggtagttactattcataacagtagcaaaattacagttttatggttagggtcaccacaatatgaactatattaatgggtcaaagcatatgagatttttcttgaggaaaaagaaatttagccctttgctctgtgaagatatctgaggagctagggcctgaggcatggccctggaaatctcttacttcagttctgggcctaccatccaggagtgcagaacctcagcaccactgcagactactggtgtggaagtctatttgaacggaggaaactgagtgtcagagactgttgttcatccaggaagccatgttacccacctgggcccggcggacgttaagaaagcgggagccaccctggtggcagctcaagccaaaggcgcgacttcggatttggaggctctgggagaaactccccagaaagttgctctggggcaccccacaaggtagccttaagcggatcccggaccgcagagtagggggtctccttgctgcgcctctcgacgctgccacacgcgggtgggcagcgcgccaccccgcccccggccccgccccctgcgcccgccccgccccgccgcgcgccctcccgcccgcccgcgcgccggggcccggagccgcctcattggctgc

SEQ ID NO: 49888 - DNA, 329 bp, Mus musculus
  source 1..329: mol_type = other DNA
agaaaagtcgagactcagcaggtctggccctcaatctccctagagtctgcagaggatctgtcccagtactgagacctctagcgccatgggggatggggtgaagtcgggttagggagccccccccccaccctaggaggaggagtgggaggaggaagaggagttcctccgaagaaccagctaggacaagtggcttaaggcccttcagcctcccacaccttctcaagggagcatggccacccagcttccaggacagggtcctctgctgcgagggactaaggaggccccagaagcccgggaagtgtccagaggaggaacttatggggacacaa

SEQ ID NO: 49889 - DNA, 259 bp, Mus musculus
  source 1..259: mol_type = other DNA
tggtaaatttaaaagctcaagatttctgcttttaatttaaaaggtagtgctttgcagtgtattccaggctggcctccaaaaacacagtctgactctgagctacattcatttattcattcaggccgtgctcaaagctatagcgccaggcactgctgaccgcagccaccgtcagagaggatcctcgagggagctttcctcactggagcagccctgagatcctcctgaaagtcccgggccggccgcaggaaggcggggcctc

SEQ ID NO: 49890 - DNA, 362 bp, Mus musculus
  source 1..362: mol_type = other DNA
caagtgctcttagccgctcagcggaccagcttctagaaattctgtctcaacaatgagaaactatccgggcgcgctcacctgcttagggggtcgggcagatcgcgtcacccaatcccgcagtgaggactcgggcgtcaccccgaatcgttattttccttactcataagtttaaggcatgaggaacgtgtctacgttcctcaggggtaagaaattatattctcattactaaaagacttgtcctcttgataatgctttttaatggtttatgatcgatataattctaattcctcattagcatccggactcctccggggagagaggctccacccctttccgggttgccggaagccgctcttgactcc

SEQ ID NO: 49891 - DNA, 362 bp, Mus musculus
  source 1..362: mol_type = other DNA
atggatgtaattcaagatgtcaggcttgccagcaagtggaatgctatttattttttaaaaatttatggtggctcatgtctgaagacagctacagtgtacttatgtaaaataataaataaatctttaaaaaaaaaatctaggcaggcagatttctgagttcgaggccagcctggtctacaagccatggcgaggccagcctggtctagtctcgaaaaacaaacaaaaattatgtgttgagtgtgcctgtggaactgggttccagatactacttcccaataggacagggaaggaggcgggcctagggctgagagggcggggccccgcgtgacgccgtcgtcgtggaaacgcagcggcgccggaac

SEQ ID NO: 49892 - DNA, 628 bp, Mus musculus
  source 1..628: mol_type = other DNA
tcgaggctcgctccggctatatgaaagagctctttgcttaaaacgggtcgggctaagcaaggccgagcggagacggcgccaccgtggtccccccggacccgatcctccggggagcaaggccctggcccgcccagccctcggctcgcctgcgatcgggcctcccgggcctcccgggcccagcagccagtggaccgaccagcagctgggcccgcgcggccgggccaataaggagcgcggcggacgcagggggcgggcgcaagcggcgtcgccccccggagccgctccctcctccgcagcgaggcccctacgagcctcgaggaaaagggaaagggccgctcaccgtcccttggccgccgtcccgcgcttccggatgagctcgtccagcgagagatcggccatcttgcggcgcgcagctagcggagaacggaggagaagccgactgcggcgagcccgccccgcggccggagtcaagagcggcttccggcaacccggaaaggggtggagcctctctccccggaggagtccggatgctaatgaggaattagaattatatcgatcataaaccattaaaaagcattatcaagaggacaagtcttttagtaatgagaatataatttcttacccctga

SEQ ID NO: 49893 - DNA, 274 bp, Mus musculus
  source 1..274: mol_type = other DNA
gacaagaataggccagcgccctctctcctcgcaagataagacagccttcttgccatggcatttgctcttgcgagagtgaccagtccagtatggaccatcaatgacattctgatgttaagtcaacagtagttccttccaggcagtagagctctgtttaattctcagtgcccacggtatacattaggcctggaggcctgggctatgcaggccctgtgggaggcctcctgcatatattgggggccccaacccagagagcatcctcccacttaggaca

SEQ ID NO: 49894 - DNA, 307 bp, Mus musculus
  source 1..307: mol_type = other DNA
ctgcactgtcactaaagaagtgtcacttctcaatgtagccctggaatgcactgtagaccaggtgtggggacaagaataggccagcgccctctctcctcgcaagataagacagccttcttgccatggcatttgctcttgcgagagtgaccagtccagtatggaccatcaatgacattctgatgttaagtcaacagtagttccttccaggcagtagagctctgtttaattctcagtgcccacggtatacattaggcctggaggcctgggctatgcaggccctgtgggaggcctcctgcatatattgggg

SEQ ID NO: 49895 - DNA, 374 bp, Mus musculus
  source 1..374: mol_type = other DNA
aactccggaatgccagggacatacgagtgtttgctctgttctgaggtccgggtacacagagaactgactgcactgctagtggcgtccctggagggagcacagggccagagctggcctagcctcagaactctgtagccagcggtgttggcaacacgccccgtgagcgggtagagtggccagcacaatcagctccggcaggctccatcttgttctcttcaccaggacacagaggcgccacagtagccagtctctcgccgagcctcttcagcgcgcactcccgtcttcacaagcggaagtgggcggggacactgggagtctccgccccctatccgcccactccgcagggcgtccccgcctccgaggtgttgagaccg

SEQ ID NO: 49896 - DNA, 285 bp, Mus musculus
  source 1..285: mol_type = other DNA
tggttcaacggctagcagctggaggcaaagcctgtttacccaggctgttctcagggcacgttggcatctagcccgagaggagagctgcgtgggcccggcccttccttgggtcacagcaggccagagcaagtggcgtttatgtaattaaccaaatggctttttatttttttttccatctgttaaatggaaaaaaatagagccgggaggcggctcacaccttctagacagaaacgccagaccccgcccagggctggaggggcggcgctcctgtccgctgggctcaag

SEQ ID NO: 49897 - DNA, 340 bp, Mus musculus
  source 1..340: mol_type = other DNA
acagatattcatagttaatatctcattggacatagagtagctgtgattcctgggcttccaagtcccaggatacggtgatgcatgtctgtccttctggaggcgcttcatcctcaacctctccatatatatatatgtgtgtgtgtatgtttatgtatatgtatatatgatttcaatgttgacaatccaactttgggtcctcttgaagaacactcagcgctcttaattactgagcggtctcattttctacaaaaaataataacaataataataataattttctaccactagaggcgcaggcgcacctgagcacttggcgtctgcgcaggagcttacttccacg

SEQ ID NO: 49898 - DNA, 361 bp, Mus musculus
  source 1..361: mol_type = other DNA
aggtgataccaaaacctgttttgaccgctgtaaaacacagacttgtttctggtctttacttgttgcctacaggctacaagattatcaagccagtatggctccagttcaagtccagccttggactacacagtgtgctctaggccagcctgggtttcccagatgggagagagatcactactatgaggatgagacctgctggctctcccatcctggggagttgtccgagcgtccgcgcatgcgcctgccgcgcccgacttcgaaattggaacccggagagaacggcgcgtgcgcccgcttgtgggcggagcctgggcgcggcaggggcggggcttgtcgtcacgcgcagccccgcccctcggtc

SEQ ID NO: 49899 - DNA, 321 bp, Mus musculus
  source 1..321: mol_type = other DNA
gtatataattttaaacaacctttattggcaaataatatgtgtataaaaagatgtccagacatgactgtgtgtggggttttcacatatacagtatatatatgattagttcaaggttccgtctcaagtaaccagaaacccagaagctccctggctccagtttgtgcacacactatacccaaaatgttagcaagaagaacaggcttggccactttacagctgagacaaggctgagtctgtcatgtaaccatgggaatactcaggtgtcatgggccaggcacgccggagccagcagcagtcagaacctggagcttggtactgtga

SEQ ID NO: 49900 - DNA, 238 bp, Mus musculus
  source 1..238: mol_type = other DNA
tctttggaagagaagtcagtgctcttaactgccacgtgtgtgcacgaatgttttttacatgtgtgcaggggcccatggaggccattggcttccgggtcctatgcaataacgtttctctgacaggctggcttcgaactcagaaatccgcctgcttcttgtaggtatctgttataccttgcgctttctagcctctaagcggtttgtgcgccgtgggcgtggccgcgcgtggagattgcgc

SEQ ID NO: 49901 - DNA, 312 bp, Mus musculus
  source 1..312: mol_type = other DNA
gaaagtgagaaatggcagggtgtaacacactatgtagaccacatggaggaaactttctttaaaaaaaaaaaaaaattgtgtgtacctcgtgcgtgcctggtaccaacaatactaggtacttggaggtcctctagaaaagtagcaatttctccagatccgaggaaactttcttatctgaattatggcgtctcccagggagagcggcggctcctcgtttgactgacaggacgctaatgctagcccaagtgccgcctccgctttagactatccaatctggagcgccgcgcgagcacagcgggcgcggcgggggcg

SEQ ID NO: 49902 - DNA, 219 bp, Mus musculus
  source 1..219: mol_type = other DNA
ttattaagcccttaagtctatggcattggtatgccaaggatcagtgtgacccagactcacaatagctctcaatatagtacacaatctttacgattattgagacagagcttctctgagtgtgtgttcgaactcaacatacgtagatacctattgaagaggtaacataggaacgtttttttactggctgcctagatgacccgacaggaaatacaggaagga

SEQ ID NO: 49903 - DNA, 359 bp, Mus musculus
  source 1..359: mol_type = other DNA
tgagagatgtctcaatcagaccgccttcggctgctgtgctgctggttaagaacatgagtttcatttccagaacctgtgttaaaaccctgggtatagtagtacacagttataatcccagggcccaggacaggcagattggtggggctccttgcccagccagcctactctaattgactcacaggaagaggctagactaacacaagaggcagaaagctttgcgtgcaccagctcagactgactgcgagctcactgtcatcctaaacatgtgccacctctcccctctgtgtccaggcccacgatgaggagagagggtgcctccgggtgcggcgcagggcggggcggggcgaggcggggtcagc

SEQ ID NO: 49904 - DNA, 326 bp, Mus musculus
  source 1..326: mol_type = other DNA
gtattggcacatgtggggggaggggctgccttcccgtgtcaggagaagattccaaatatcaccacccctctcctgacaggagagggaagagtccagctgactacttgacaaagcacgcagtaggaggcacctgccccagattctgacctctgctatcccgagctgaactcggagcccctgctccagggcactggaaaaggagggctggagctccgcccttgctaaggtttggccgcggcgatggcagaggcggcgtctgcggaaagcaagcaggtctacaggcgacacggggagggcgcggccacctatcagggtccagcccgccg

SEQ ID NO: 49905 - DNA, 572 bp, Mus musculus
  source 1..572: mol_type = other DNA
ataaaaaaataaaaattttaaactaaaattaaaaaaaaaagggggagcaccttcgggcttctaagcagcgttcccagaatccctcgcggcagtcctgggatgaatggagaagacacgcccccagcgcgcgtgcgcactcttggaacctcgcaacccaggacgcaggcgcgtgcgcgccgtccgcttaaatcctgcggtgggcggcgccgtgctcttccgagcactatggagatccagtccgggccgcagcctggcagtcccggccgcgccgagaggctgaacgcgcggctgctggacgagttcgtgtcgctgcacggccctacgctgcgcgcctcgggagtcccagagcgactatggggccgccttctgcacaagctggagcacgaggtactgcgagcacagctcagcagctctgacaggccatgcgcctgtgccgccatcctgcagggttatgggcccgccgaggatgcgcagggacctgcaaaccggcatgcgcttggctcgcagcatcccagccggaaactgaggctccggcggatgcaggagctcctgttagattcaagctacaccgg

SEQ ID NO: 49906 - DNA, 470 bp, Mus musculus
  source 1..470: mol_type = other DNA
cctttgaattcaacaaggcattccaaggactgagaaggctcctccaatccctagaaagatctggtctcccaatgccttcgaaacaaagtgagtttcttggtcagattagtctgagctgaatgtgaccctgtggctgatgatgataaccaagccctagcaaatggctcagtggtaaagcatttgccatgcaatcttaatgacttgcgtttgataaaaatggaaagagaacagactctacaatgttttgttctttgctttcttagtagttaactgccttataaaaaaataaaaattttaaactaaaattaaaaaaaaaagggggagcaccttcgggcttctaagcagcgttcccagaatccctcgcggcagtcctgggatgaatggagaagacacgcccccagcgcgcgtgcgcactcttggaacctcgcaacccaggacgcaggcgcgtgcgcgccgtccgcttaaatcct

SEQ ID NO: 49907 - DNA, 509 bp, Mus musculus
  source 1..509: mol_type = other DNA
ctaaaactctagtctttgaatctcctccggagaggccattgagtgcccgccaggcctcaaggccgaggggtcaggtgtagaccccagggagaccgcgacgccacggttctcccgcctcgctgggcctgtcacccgaggatctgggctgaggtcactcaatccggcctggtcgcgcgtccattcactgggagaacggttctaggcgcgacacgcgcctgtccaagaagttcctttgattttgtacgcaaattctgaagctatcgcggcaccacgacaataaattcctatgtattggagcagcctgcggcccagtccaggccccgggtgacaccctgtaccgcgaccccagctctctcggctcccaccccccacctgccgccggccccgggagaggaggcgggcccagacgcccgcaggccacgccacccgacgcccactggacggcctcccgcggagctccgccccccacggccgcgggccaatgagcgcgcggctgtcagcttgtcctg

SEQ ID NO: 49908 - DNA, 164 bp, Mus musculus
  source 1..164: mol_type = other DNA
tgtgagtacctcagaattgaaggggcctgtagccctggcttctctggggctcaggcccagaaataggttcttaaggtgagaggcaggcttgctttagcattggctagaccaaacatggggtgggccatcccctgcatccgggtgttccagagtcattcagctca

SEQ ID NO: 49909 - DNA, 413 bp, Mus musculus
  source 1..413: mol_type = other DNA
gctcagcatcacacgctcaccatcacatgctcagcatcacacgctcagcatcacacgctcagcatcagaggatcctgtgcagtaagagagctagactgcccagggcacaaggtcgtgcgaacctacatctgagatgcagccccagaacagaggagggcccttccttgcctctgataggcccaggtgagggactacatctggcaggacagataagctcacgtgcctggcatttctgcacagataaattatttacctgtgtaaacaagactcctttcgtgcttaaagcaccgcaggctagcgtgcagcttccatccttacaagccaggggggaagaacaccacagggtcctgccacccttcccaggccccccgtggggaccagaccaaggtggcagggcagcggatcctttgcca

SEQ ID NO: 49910 - DNA, 715 bp, Mus musculus
  source 1..715: mol_type = other DNA
ttaagggatgttgggtggacttccctcctaagttccattgtggggagaggcccaggacagagctaggcccgggcctcctggaaacctagcactaggttttctaggtgaggccactgtgggccacccaggagaccaggctgggagaccgggaggaccctggcctgatccagttgagggagggggaggtgtccgcatctctctatggacagagaccccggtggccccaggttggggtcctaaccgcggagcgggtgcccgggcaccgagaaggagccacgcatgcccctgcacgcggtgcctagcgcggcgcgcggctccggaggtgagggcgccccgccccgctcccctctccaggcgctcggcggccggggctaggggctgcgtggagagggcgcggggcggcccctgagcggcgggatgcgggctcccggcccgggagggcgccgaggccccaggcgcggccggggcggccgggacccgggcgggagggcgcgcggggccggggcccgaggccgcgatcgcgctcctgcggggcccgggcgcgcgggcggagcggcgcggcggcgcgcggggccggggcggcgcggagccgggcgggggagggggagggggcgcggggagccccccgccccgcgaaggaggagtctggctcccactcgcagcctcggccgcgcggcgcagaggcccccgcccctgcgcgccgccctcgcgggag

SEQ ID NO: 49911 - DNA, 285 bp, Mus musculus
  source 1..285: mol_type = other DNA
cagtgtggccgggcggtaagcagcaaggtgaatacatcttctttcacctctctgtgggaggcaccctccaggcagacagcttccagattgtccatgaccaccatggagccaagggcaagtgcctcctaggaaggtggctttgggggaacacttctgccccagtgcttgtcaccgagggacacatatttgttacaggagcatgtgtctggagaggcagcttgccgcctctatctagggatacagaaggccagccccaccctcggcagctgtgggcggggttggggg

SEQ ID NO: 49912 - DNA, 459 bp, Mus musculus
  source 1..459: mol_type = other DNA
cattactgatgacatcagtactgtcatccctcgtgatgactataccatgccatgtactggcacaaggtagagtcatgccctacagtagacaaaacttgctgctcctgcagaggacccagcttgattcctggcctctgtgggcattgcatgcacacggtacacataacataaatgtaatcttttgagggcaaaattaaacattactttcttatttttaattgcaacataactatttttgagacgataatgtatttgagtaagtgcatattcgcacacagattatatatgcatatgtaaataggcttatataattctgatgaatatagcaattatacaagaaaaagaacacaagaatattttgctataagaatgtaaagataaataactctgtcccagggacagcatttccggaggaagtccttcctaggcgggttaccatcccgggacgtaccctggttg

SEQ ID NO: 49913 - DNA, 453 bp, Mus musculus
  source 1..453: mol_type = other DNA
acaagtgttctccagtgctggggaactgaccccagggcttcccgagagggaggagctctactcctaaggggtttcccagacccttgggtggctcctggaaataggattcccattgtcaaggatgggacctggacaggtggcgggcgccacctggagggtcctctctgggggagggctctgccgagggtcttctcggcatgggagtttcctctctggaggagagggggatctgcaaggggaatcctctgcctggcatcagaagcttctggaggtgcggcttcccggaccccgaggctcgccctgggtctgcgcatgacctgccacgcatgactgacaggcagtgatacggacccgacgcacctttgcggcaggcgcggggcctcggcaaccgacgtcaggggcgcggcgtgcgtgggtgcggccatgacgtcatgcccgcggagccccgcgccg

SEQ ID NO: 49914 - DNA, 162 bp, Mus musculus
  source 1..162: mol_type = other DNA
aatagttacatttattatctacacaggcagcatgcagtgtgtgctgtggcatgctcacctgctcagaaatatacatttgagacacgtggagagggtggctgcaccaacccctcacttgctagggccacagctgacagcctagggcggagccactctgctcag

SEQ ID NO: 49915 - DNA, 173 bp, Mus musculus
  source 1..173: mol_type = other DNA
gccaatcacatattttatttataagtgacacttgtacatctgtcagttcttagtactgtaaaattaaacaaggcgctgactgagaggaggtcaagcctaggattccagtacgcccattgggcctcccactggcggcggggcctcagctgacgtcacccgaagacagcttaggc

SEQ ID NO: 49916 - DNA, 353 bp, Mus musculus
  source 1..353: mol_type = other DNA
gctgaacggttaagcgtgtcaactgtctgaagacagctacagtgtacttacatataataaataaataagtattttttaaaaatatgaatgtgggtgtccatgcacctttaattccagcacttggaggccaggggcagctcagtgagttcgaggccagcctggtctacaggagacaggcaggcggatttctgagttcgaggccagcctggtctacagagtgagttccaggacagccagggctcctataagtaaatacataaattaaatgtcatacacatttctgcaggattgaaccaagctgtcaggcttggaggatctttgagctcagctccgtgtacggaccaatgagcgga

SEQ ID NO: 49917 - DNA, 262 bp, Mus musculus
  source 1..262: mol_type = other DNA
ctagctgaacagccagcttggcaggtgctgcctgcgccccggccctgatagcacagcaccgtggctcccatggaatgtgtatgaggctactgtcccacaaagagggatgccctagtccaggattctggcagaggtcgtgcctggcactacgcgcagggtcctgctgtattgcgggcgggggagctcagctgcagcaccgggacctcggggtcagtaggcaggggcggggaagccggggccgcgccctcctggccactccccg

SEQ ID NO: 49918 - DNA, 314 bp, Mus musculus
  source 1..314: mol_type = other DNA
gcacaccgggtgtgatggcgcacgcctttaatcccagcatgagttcgaggctagcctggtctacaaagtgagttccaggacagccagggctacacagagaaaccctgttttagcatggctgcaagcctggaagacttcctataggaggacctgcctgtaactcagatatgtaagagtcagcttggtgactttgaggtcagtctgagctacatgagactgtcttgaagaagcaagcaagcttggttggagcaagcaagcttggttgatgccatggagtctaagctgtctgcagccaccggggtggcagaggaagt

SEQ ID NO: 49919 - DNA, 420 bp, Mus musculus
  source 1..420: mol_type = other DNA
ccctaggcaataatagaaagacatgcttcgtatgtttcctattaggatgtgtgtgtgtgtgtgtgtgcgcgcgcgcgcgcgcgcgcgcgtgtagaacactagtggtggcatgcttgcaagcatgaggccctgggtttaaccttcaacattgtgcacggagggctatggcactcagagccccacacccggggtggcaaccgggacattgtgggttcagagccagtattgaattcccacaatccaccatccagaccagtctggtttacaggagactgcctcaaaaaaaaaaaaaaatagttttcttgtcaagatctgctatgatcatacagttcatgcgaatggtgttcaaagtaaagaagataatctttccaagactatctaatttccaagctaatctttccaagatttcagctggcagaa

SEQ ID NO: 49920 - DNA, 359 bp, Mus musculus
  source 1..359: mol_type = other DNA
gctgggtcaacccctcctggagtgtagccaccaggagggctgacaccttacctgtcatcagtatgaatactgcttctgagcctgagagtgcacacagatgggcacaattctggataggtttcctgtattcccacaagaacaattcttcagctgcaaaacggaaatggcccagagccgtgacccaccaggaactgagctgggccccagcttttgagactcaggacaaggactgagtctgtcagatttttagaagctttcggtgggcatttaatgaccgtgactccaggagcctcctacagggaggatggtcctctaggggcgcgggctccgcgggcgtggtctctggtgggcgtggcctc

SEQ ID NO: 49921 - DNA, 284 bp, Mus musculus
  source 1..284: mol_type = other DNA
cattgaggtctcagaagtcaaaggtgaccccaaaatactcaagggtattctctattcagtgaagaagctccatcctgactgtcccctgggaggatgctgggttgcccaccaagtctgtccctgcccttgactgcctgcctcaggggtggctagcagaatagatctcccagccagagctggggatgcacggggcagggatctgtccacccgtaaggagaggctgcatccctgcaggcagttgctggtgcctggcgtccttcggagcaggtaccaagctggggagc

SEQ ID NO: 49922 - DNA, 322 bp, Mus musculus
  source 1..322: mol_type = other DNA
gcttggaagtggcaggcaaaacgagtgggactcccagatcttgctggtggcagaacccgggagagattattttgccctgggtgccagggtctgtcctaggatcattttgccttgtgcctaagtcaccagggcctgagaggaccctagtccctggcccctcccccgagaaaaggctctaggacagccaggcacccggcagaatagatctctgtgggcacagcctttcctcctggagcaaaggagccagccccttgagctggccctttggccgcagagggctccaagacgccggccccccccgcccaggctggaggccccgccc

SEQ ID NO: 49923 - DNA, 190 bp, Mus musculus
  source 1..190: mol_type = other DNA
cctttggtcccctggggtcaaccacacatactgcataggctgggtatccaacaacccgcaccgaggtcaggcctgggagagcagacgcgggctgtgttttccaactcagcacagggctagcagctgctgagggccagcgtcccgtagctccccccgcccaccctggggactcccggctgtgcgctctgag

SEQ ID NO: 49924 - DNA, 564 bp, Mus musculus
  source 1..564: mol_type = other DNA
ccgcggccccagcgagatccaggcgcgcgcgccggaggaaatatagtccctgccggcggtcagctggcgcgggcggcgacagggcgcgcgctggggggctgcgcggggctcccggcgcctgggggccatgcgccgggcggcgcaggcagcccgggcacccggcgcaacttagcggcagccggaagagttgggcgccagctcgctctctgtgcccgggacaccggatccgagctctcccggtctggttcccgccgagccgcacaactgcgagctccggccaaagtgagcgcaaagtgctgcccaagttgcggcgatggagctgcaaagccggtccgaggcgctcgcggtggaactcgcgcgccaccaggtaccggatactggaccggggagtggaagcaggccccttcctggaacatgtcccggggctgggatggaacctgccccgtttgcacaactcgggcgaccggaaaggggacccagagctgcccagggaacagggtgcatggaccggccagctcctagcctcctgctccgggcccagcccggcaccgaccggcggccggt

SEQ ID NO: 49925 - DNA, 534 bp, Mus musculus
  source 1..534: mol_type = other DNA
gtgtgtgtgtgtgtgtgagagagagagagagagattcttgtgacccacggaaagagttagttatgagtctctatcaattcacggttactctgacacagagcctggcctctttgaaacacactagtgtgctagcgcccagcatccgccgcagtaatctctgagacgttgaccccggccccgggactgggaattctgaaatgtcatctccgcagctggatttttaacaactgtctggaaaaaaaaaagtctagggacatctgttgagagtttaattgtgagtgtaaaaaaaatcattaaaggaccaatcaagaggttttggacttttagttccccagtctcagttgggactgtgaaagcattccctgctccccgtgctctcggctgcgcaccgaggagatcgctcgggcgcccagatctcagagccgcgactttgcgctccgctcagcctcgctgggccgaacgcaatgcgcacgcgcgggccgggcggggcggggcggggcgggcagcgggttcccggcaccgcctcctgccgcc

SEQ ID NO: 49926 - DNA, 426 bp, Mus musculus
  source 1..426: mol_type = other DNA
gaaaaagtttggaactattgctctagatcttaaacaactgaaccgctttagagtgctgtagtcagctaacctggtccaggacgcatacggttcgtcccgcagctgaatccctccggggacttcatctcctgtgggccctagctggtcctgcagcttggggcaaatttacaggtcccgcagggctctccagcaatcacgttgcacgcctcccgctagtgtctcggcagcgattggcgcgcgaatcagtggctttggctcccggcccgctgcccgcgctccctgtgcgcacgcgcgagctccaatggtcctcgggcgggcttgcgcatgcgccgcgcgacccaagtggccctcaggagaaggggccggcggcggaggctccgacgcgcatgcgcagtagctggatgcgggcgtcgcttgcctcttccc

SEQ ID NO: 49927 - DNA, 260 bp, Mus musculus
  source 1..260: mol_type = other DNA
acagaactttatgcttagcatgattgtgagatggtcacctaccctggtcctgggaaaggacccctgcatcttcagatatctgaccccttttcctaagtgttcagcagaggaaactgagtcttgcaagtttttagcagaacctactctcagaaggcggggccaggaccagggacgactcaccgccttgcccagagatctgggcggagcgggcccgcgtcgggggtggggcctgggcggtgtcgagcgcgcgcgggcgggcg

SEQ ID NO: 49928 - DNA, 428 bp, Mus musculus
  source 1..428: mol_type = other DNA
agattgacatctttccacaaagtatctgtgaacacacaatgccccttactcaacagcagggtgttctgctgtgggtcaagacactttgtttcatgggaaaaccttgtttgttgttcccaccactgattgggggcccacttcatcttgaaggagccctcaactgaagaggtacagcacaaaggagcaggttttcttctctaacccagggtcttacttggactgttaattttatcagtatctggcacatagtatgggctcatgcttatgagaattagcgtctttgcggtatagaagttgaggtcccaaagatgcttatgggattagcatctctactttgcagtatagaaattgaggttccagagattgcgttatctctgacaacactgtgaaaacctcagcttagtttctgcactctttagttgctctgg

SEQ ID NO: 49929 - DNA, 534 bp, Mus musculus
  source 1..534: mol_type = other DNA
acccacagagtaggtggaactctgtgagcttgaggccagcctgttctacagcgctagttctaggacgaacaaaaacccaggttttattacacatgcatttttccttgcctgggcaggccgacctgggaagatatccatcccagccttatttagagaaagagcccacccacgtgtactctcgaacgttcggggtgggcactgagttcacccgattaacaggtgctgaacctgggtacatatgctcattagtccctggatctaaggggccagacgcctactctgacacgtggtaagggagtgctgtacagccgccgagctcaacgccttctgcgtttccgcggggctgtccgactggccgcgagacattcagtctcttaagaccaggctcatcgtggacacgcttctcttgggggcgggacgcgtcgtggccacgccccttcgggcggggcttcccgttgccgcggggcccagggcggaacgttcgcgcgggcagtgcgcgcgcgcggggggaaggccttgagagagcgctgcgga

SEQ ID NO: 49930 - DNA, 666 bp, Mus musculus
  source 1..666: mol_type = other DNA
gggggggggggccctggatccgggggcgtgggtcccctcaggcctacagcagtcaacagcaggggactggggtggctccatcccctcaggccaaccaaggatggggtgggggattcaaggtgacagccggtccttgggttcccttgggcctgggggggggccctggggtgcctccgtctcctcaggccagcaatgggcaatggctgaccctggctttcctcaggccaacagtgagggcccttggtctaacatgggaccctgggtgccctaaggtctacaggggtcctgggtcccctcgggactacaacagtcacaacggagttggggtttgtggtttcggtcccggcagacccacaggaggcgacaacgggggctggggggtggctccctcaggttaacaagagccgagagtgggtccctgggtcccctcgggtctacagcgggcgacagcggcccgtggatcccgaggccgtggatttctggggcgctggttaccggagccgttggggccagcctcgccacgacttgaaattctccacgagcagcagctcaaggtgccccatggctgcgcgccgttttcagtctcgcgagactggcgcggcaacggaggttggcgttgcccggggaattggatccctgctccgctgcggaaagcggaccgccggg

SEQ ID NO: 49931 - DNA, 293 bp, Mus musculus
  source 1..293: mol_type = other DNA
ttgaaaatcccagcggttagagccagctagcattattcattaaaggttcccttcccatacgtggaagcctttgcttatggctgggtcttctgcctgcgctgtcagctgtcatcaagctagccagagcatttgtcacctgcaaggaagcaaatgcctcgctcaaggtaaggatttccaaatctagacagccaaactttgcttccccggcggtccgctttccgcagcggagcagggatccaattccccgggcaacgccaacctccgttgccgcgccagtctcgcgagactgaaaa

SEQ ID NO: 49932 - DNA, 437 bp, Mus musculus
  source 1..437: mol_type = other DNA
ccctgagtattcattcactgtggaggatgatgactcccgattatggacggtctatctagcgctagtctgtttgcagatatgcacaattatttgaattgctggaactcgatctacagaactagctcaggagataaagtctaaatttttttgcatttatttatattacatgaatgctggaaatttgagctcaagcttttaaaaaaaaaattttattgttcttttttttttttttaaataaatcagagagtcctctaaactgtctggcggctgccagggagtctacacaagcaggcttctgctggtctagcctacggctgcccgctgcctgctccccgcaggagagtctgggtggcggcgtgctccagctgcgcagtgctgaagggagggtccccgcgggccccgcccccgccgcgcctcctccgggcgggataattgaa

SEQ ID NO: 49933 - DNA, 379 bp, Mus musculus
  source 1..379: mol_type = other DNA
tcacaaaattgcttctatcacatattttgatattgcaacaagaaaggaatacacctgaggctgtgggaagcctccttcctggagtcttgggaaagacttctttcccaaggcttcccatgaggagcctctatccaaggtcttcctcggaatctccgattcaggtctccctcagtggtggagtctccatttcaggtttgagggtaagtctcctctgcagtggttccccagagggaaacctctgcatgagtggacccccaccaatggtggcccttgctcatggaaagcatctgtcccttctccccaccgtggggaccgaagacctacgcaggagcaggacttccgctggcgaggcaagccagctagtctcgcgctctctggg

SEQ ID NO: 49934 - DNA, 540 bp, Mus musculus
  source 1..540: mol_type = other DNA
ctgcaggacccaggtaccggaaccctggccttcctagggccaagatgaggctggcctcagagcgcgccgggcggggtgggggtctggtcccggccggcccgccaagagtgactaacgcccgcgaggtgcggtgcgctccgttcggtcacactgcccctccacccccaatccggggaggccgagacagattgctacggcggcgagcagcgagcgcggcccgcctggagcccgcccggccggccgcgccagggggagctcggtgagagggggccgggcgcaaggccccgggcgggcgggggcgcgggcccgggacggagcccgaggctgctgcgccagccccacggccccgagttgtccgcggcgggtgcaaggcctgcgcgctcgcggcgagtgcgcgccccgatctcccccgccggggatgccccacgcaccccccccccggcccggcgcgccctcccggcggctagcgctcggcccgggctcggcgcccagcgcagcccgggggagggaaggcgcgtcccacccccggggcctggagcc

SEQ ID NO: 49935 - DNA, 368 bp, Mus musculus
  source 1..368: mol_type = other DNA
ggtcccaccatgtgtctggttactagctggagacctagctgtgacaggcagtgtccctgtcacccatttatcccacaggatgtgccaggcacctaggccagtctgactggcctgcagagtgagacagaatcctcagactgggactctccaaggatgcctttctgagtcgcgctctgcagtgccgggcactagttgtggccctggaagcaccggaaaccaagtgacgcgggtagtttgccctccctcccctcttcccacgcagtcctgggagggcgatcggaagggagcgcgcgcgagagagcgcgctgcgagcgaggagggcgggcgggaggcggatcctcctacctggggcgcgctcgcctgctcgc

SEQ ID NO: 49936 - DNA, 320 bp, Mus musculus
  source 1..320: mol_type = other DNA
accctcagcactgatcgggggtggggggtggggctcaccatgtccccagctctcgtctttcctgaagtggccgcaatatctgcagtggatacaacggcggccctggctcccatatcagacctgtgctcacaggtctccagggtctggactagaccttcaactatgttccagagttgcccaggctttccagcgcagggtcaggcctgtgtaggccactgtcccctgtccctggggcaatgggttcagacaccaggccctgtgccctatggctctagtggcctgtggccagggtgggtggggagcggctgggcctcctccag

SEQ ID NO: 49937 - DNA, 394 bp, Mus musculus
  source 1..394: mol_type = other DNA
gggccttgttccctctgccccatagactccggatctggggccacaatgtggacttagacctaatcccttgacccttgggctgggcaaaccggtctgaggcctgaaagaagcaggtctttttcccttctgagagcagagctacctgagaccagagactgagcctcagtttcttcagcgatacagactggccatgagtgtccagccagggtctgcacttgcgcccggctggccaccatggggagttaggctcccccagcaaggtcagctcaggccaccctgagcccacgaggggggggctcttcctgcctactacttagcaggagtcctggtgattctactaaccctcagcactgatcgggggtggggggtggggctcaccatgtccccagctctc

SEQ ID NO: 49938 - DNA, 646 bp, Mus musculus
  source 1..646: mol_type = other DNA
cagacaggagggctggcatagcacacatttcgttcccaaaggagcggcgtcctggggcgttggcacctcggggggcatgtgcattccgtgactgaagatagcggctgctctgggtcgcagcctgctcccagttgcagcctcccgcctgcgctgtcagttggcagagccccagtgcctgagctggacacagtcagcccctcaacccctggggccacagcccggggcggggcagaggcggagggtgggtcagagcggccgcgcctccctgcgaccgtccttggccacctgttgccgcgtcacgaactcccgggactcggggagacccgcagccttgaacttcagtcctggccggtgcgcggggctgggagcaggagggagtgcgcgccaaggcgcacccttcccaccgactgcccgggccccgaggcactaaatgggcatcgaggagagctgccccgggcctcttaggccccgccctcccccgcagcagccaatcagacactgccgtccagggggtgtgtctcgccctgagccggggcccgggcctagggggcggagtttccggggcggtcacctcgccgcgggaccccgcaggggacgtccgaggggcggcgcgtgtcgtgggggcgcggctggcacgggcgcgcgt

SEQ ID NO: 49939 - DNA, 164 bp, Mus musculus
  source 1..164: mol_type = other DNA
acagggtgaacaggagttctgattgagaaactcagtagcaaagaatatcagttggtccacagcaactggccgtttgtgagacagtctctcaatgaacctgtcattgctaagccagggtccttgttgatgcagccctgggtgtagagggacaggctgacagtctc

SEQ ID NO: 49940 - DNA, 239 bp, Mus musculus
  source 1..239: mol_type = other DNA
aggaggaaatttcatcttgacaaacttaagaaaagaattagatttctatgtaactccttccaagaagttaagtgttatataggcttttcttgtagatggaaacattccctcctgctaaacttaactaagttaatgctgcaggagataggtggaactacttccaaagcggagcctcagaggagctagggcggagccgcgcaggcgcagtgggccacgcaggcgctctgggggtcccggag

SEQ ID NO: 49941 - DNA, 301 bp, Mus musculus
  source 1..301: mol_type = other DNA
agtcctggagacccaaggtttgatctttaggtagtacacacttgtgatctaccacctaagaggctgaagctgaagaatctccgagggggctggcaaggccctccccagttttaaaaagaactgatcctggagtagatccttgatgaccctgagagcccactgttcctgggaactcactgccctttgggacccaccgggggaaccccactgtccctgagagtgtactgtccccgagagaacccacacctcgggtgatattccggagtggcggagcacgctgcccctgccccgcggcgagctg

SEQ ID NO: 49942 - DNA, 269 bp, Mus musculus
  source 1..269: mol_type = other DNA
agaccaggctggactcttgtcaatggcttagccaaaaattgagcaagtggaggaaagcttcctagaactttccacttcaaagctgatctaagattggcctcatgcctccctctggcccagtgaaggagactgggaggggcacctctacccacgtggggttcaggagtagaggctgcagctgcccccacatccaccagggaacctgtgggtcggagagatctagatgagctgcgcatatccggatagcgcggccgccctcgcttcgcccc

SEQ ID NO: 49943 - DNA, 341 bp, Mus musculus
  source 1..341: mol_type = other DNA
aaaataaaataaaaatatttttaaattactgcccagtggatagccccagggccggtgggaaccttgggtccgacgaagccagcttgcctactagtgagccagacctggccgatgtgtagagacgacatccagacttgatggccttcttgatggctatccaggccaaccctcattggcatctaacagcagcaaagaagtgctaagaccggctctgtcactcttctgcatttgagggaatgggaacttccggtgggagtttcctgcgcccagcggagccaatcccctgtttaaacaggccaatcggcggccggcggagccgggcgccgcgtttaaaccggtgc

SEQ ID NO: 49944 - DNA, 480 bp, Mus musculus
  source 1..480: mol_type = other DNA
ccggtgggaaccttgggtccgacgaagccagcttgcctactagtgagccagacctggccgatgtgtagagacgacatccagacttgatggccttcttgatggctatccaggccaaccctcattggcatctaacagcagcaaagaagtgctaagaccggctctgtcactcttctgcatttgagggaatgggaacttccggtgggagtttcctgcgcccagcggagccaatcccctgtttaaacaggccaatcggcggccggcggagccgggcgccgcgtttaaaccggtgccggagacccagctgctggtcccggagagtggggaaccgggtcccgagccgcagagatccggggaggacgggctgcggtgccagctctgcagctcagagccggaaatccgttaccccgcctcggggcgcacagtctgggaaaccgggagcaagttgcttcctgcagcgaactctgtggaaggaggagacgg

SEQ ID NO: 49945 - DNA, 260 bp, Mus musculus
  source 1..260: mol_type = other DNA
ctggtcctcaaggcgtgctagcaaagccttactgagcaacggtcacagggagccagcggccgacacagcatctcgaccttgtgtgtgcccaggaacgcctttgagacctcaagcccgagcggaggctgttcctggtgcagctgacccaggagcgccagctcgatccgccgcgcgggtgagcggagcacgtttcccgccgggtgaagagtgaggacgccccccccccccgtcccccccgtcccccggaggctgggacttcc

SEQ ID NO: 49946 - DNA, 661 bp, Mus musculus
  source 1..661: mol_type = other DNA
attatttttctttccaatttaaatgttgcactttaaacaaagtggaacccgagatttcaaaatccaaggaactccttggagttaagcatttgagctcccgcgaggctggagtctaacagtctccctatgcaatgcgaggattgactttagcagccgcggcccgggactctagagcagtagttgagcgccacgctcccagggcccggtcctctgcggatgttgggtgccagggaaggggctggaggccaggccccgctagggccgcgcccccacgtctccatggagatcatcggggcgcgcacctcctggctgccctcccagggctgaacaatgagccactgggacgggggcgctggcaaagcacaccgcctagccagcaatccgtcgccagggtctgcgggcggtgtggtgatcgcagcccccgccccgccccgggcccgcccagcttcccacgcccgcccagcagagtcggtgctggggccacctggagccgcctggagccggcgctgctgcaggttgatgcgcggcgccctcccgggacgcacggaggagcccaacttggcaaactttcgcaaagtgctcggaagctgagcgggaggccgggcgcgcggcccccggtgtcctcgccagggcccccggggaggcagagcgcgggccgccc

SEQ ID NO: 49947 - DNA, 413 bp, Mus musculus
  source 1..413: mol_type = other DNA
ctctggatgccagccccagaccctgggacaaaggcctgtggggcctgaatcctgcccgagtccttcagcattcctcaaatctcctgggcgtgctcagtcctccaaccaggctagtgtcaaccctggtttttgaaaggcgagtcaaaacgggggaagtgactcctggaggatctcttttcctttaagatagtactagagctaaagtaggcttcctactctgccagcctggcggtgcggttgtgcccgtggctgcgactggcaggcggccacgcgtgcgcgtgggcacgcgcggcgaggacccacgtgggtcacccaaacaaaggcggcgccgcgtgatcgggcgcgcgcgcgcgcacacaccgggcagggagggcggggaggcgagggggcggagcggggcggcggcttgcgca

SEQ ID NO: 49948 - DNA, 457 bp, Mus musculus
  source 1..457: mol_type = other DNA
gtttctgaagaagtttcatgacaactgagctaggtcaggtccagcttgctccagggtggggctaggattctgcctgggcctaaccaacactccagggctgtcagggagccgttgtccctgccctgcagatggacacagggcaccgacaggatcagacctgtaccttagccctctggtaccaggcacaggcaaggtagacttggccagctccaccccagtctgcaacagcaggagagctgagggggagggcagaaggctctcctgtcttcttgaaagctgactccgctgtgaggcttagctctgtcacaccacagagccctgcaagttagcatctccgaggagactcttccttggtcagatgttgcccatggaattttcactccaggaagacctccctgagtgttcacttgataagaagacgccttctctgcaggactcttgctagccgccaggagac

SEQ ID NO: 49949 - DNA, 334 bp, Mus musculus
  source 1..334: mol_type = other DNA
catctccgaggagactcttccttggtcagatgttgcccatggaattttcactccaggaagacctccctgagtgttcacttgataagaagacgccttctctgcaggactcttgctagccgccaggagacctcctgggcgcacaccagcagttccacggcctatcgcctgcccaggaccgcccgggcaacatttctgcgctgctggccagcaggacccaggggcagccagagcgacagactagtgtctttcagggcacccggccgctccgaccgccctgggtccccgccaccctctctgcgtaccgggtgacgcagcgccgcctcccgctcccgcc

SEQ ID NO: 49950 - DNA, 600 bp, Mus musculus
  source 1..600: mol_type = other DNA
caatatgtctagaagtctgggtcttgagaatatagtcagggcacgagacagctgtcgtgaagcctgagatgccagcctctcacccttgagtctaagatcatagaaattttacaccaatcacgtaagtaatttcaaatatattctacagaacccaatatatataaagtatcatttaatgtaaacttataattaacatttccgtattaagatttttggatcttgaatgtatcttacaagcaagcgccggcaagatgaagtcttcgtgtcccgccatcgcttcagatgtgctccggtggaagcactgctgatccggggtcaatgccctggcgatgaggcttggaccacactacagcgggagaagctctccatcctgcctgtccgcccgcagcagggtcccgatacttgctggttggctgcgagcaaataagaccgactcggaccccagacgcacgcggctccggagttcatggccggggatcagaggccgggatccagagacctcagtccgtgccgctcgacccgagcgctctcagcgccgcccgccatggcggcactgcccgaaacgaaggcgggacttccggaatcgccgagtcacaactt

SEQ ID NO: 49951 - DNA, 897 bp, Mus musculus
  source 1..897: mol_type = other DNA
cgcggcccagtgcgcatcggcagctcggcggcccgggcgctgcacagacggcggcggcaggcgcgggccagagtccgaggcagcgcggcctggccgcctgggccgacagagacccacgccgcgctcccgttcccgccgcagctcgccaagacgccgagccgagcggcgggcgcgcgccaccagcaccggagcagcagcgtcccgcgggcggcgaggcgcgcagcgtctccggccccacctgtcggcgcggccaccctcagcgtcgcccccggcgtccccagccagcgcgggcggctcgcggcagcgctgggcccggcctcgtccgggctgcggcggcggaggcgcgctctcccggctgggcgcggaggcccgcaccgtcccgggcgaggggaccagcccagcggctccgggccgtgcaagttggactgcggcggactcggccgggccgctcgggccccggcggcggcgatggtgctgcggctcctcgagcggcgcgcagccccggccctgaagctgcctctgcgcggcggtggcagcggcggcggagcggccccctaagccccccgccggagccagagcgggcagcggcggcggcggagccggagaaggcggcggcagcggcaacagagcagtggaggaaggcgacgccgatctctggcgcggggcgacaggcgaccagagccggggccgcgccggacccccaacccgccgggccgttgcgcaatccgcggccggtctgggccctgctggcggcgcggctccgggggcggcggcggggctgattcatggggccgcggcggccagtcccccgctcccgggcccccggcgccccgcagcgcgcgatggtggccgagtggccggagcggcggccgccgcggcccgagactttctgcttcg

SEQ ID NO: 49952 - DNA, 316 bp, Mus musculus
  source 1..316: mol_type = other DNA
tctgtattgagtgagtcctgagtaattgttgccacaacaggcccctctggacagatgccaggacctggccgtgcacaggcagggctctagagggagggctccctgtgggagctttgcaaggaggctctagagaccatggtgctggtcacatgcatcaccacggaccacacaacaggtgtgaagccctcacaccacctataggtgtctcctcccttcccccgcaggccttgagggacactaagccctttctgggaacattctagaatgctgcaaggatcagcttgtcagggagctctccccgcccctccctggctcc

SEQ ID NO: 49953 - DNA, 213 bp, Mus musculus
  source 1..213: mol_type = other DNA
tatgatagtcatgggtgggccatgcctttagggaggccgatctctgactacatagtgagttacagtcagaattacatagtgagagtctgtctcagcatgcccccagattgctactacttgtcccagtcactagttcccgccccgcccccttatcccggcttggcgcggcgcgcgtcgtggcggcggcgggcggggcgcgtctcgcacgcagcg

SEQ ID NO: 49954 - DNA, 442 bp, Mus musculus
  source 1..442: mol_type = other DNA
gtgcactgtccattgaccagtgatggtgaatcggcgttcaatgttcagctccttaatggccccaggccctgagcagctagcacctgctgtgtctaggttgcgcgcaacgcccccggagaaggcgcccgccttgaccacaagcccggaagctccgcggccagccgttgagagccgtggcgactgcgcctgcgtagtcttcggaccgaacgcccgacagggcaggtgcgccagaccgcgcttgcgtagtttgacggaggagcgccggagtaacctgacctccggaggggcgaggggaaactgcgcctgcgtagtcttcgtagctccgccccgtttgcctagccggggcccatccagccctaggcatccccccccaaggcggggcaggtgcgcacggactgcgcttgcgcacgacagccccgccccgggccccgcccccgacccg

SEQ ID NO: 49955 - DNA, 493 bp, Mus musculus
  source 1..493: mol_type = other DNA
gcacaggtgtccaccaccatcgaaggggtgccggtggtctgcaccgaccccaaggtctgaccagccatcccctgtagtggaggtggcaccagctcgatgggctcgccgccagcccctgccccagcgccgctgccccggaccccgccgcccgtcgtcggcttccgggaggctacggccccgggcggcggcagcagcagcagcagcccgaacgcggctgcaagcagcaggtgcatggcgggagggctgcccggcgacccaccgagaactgcggcggagtctgagcctccgcccaccggcccgcgcgccggccgttccccgggctacttgactgcgtcgccgaggccccgccccaattgaggctcgcgggtcagcgtcccgcgagaatgaggcagaaccgctccgggcgggaagcgccagctgcggtcgccagcctgggcaatggtggccatgtcaagttcgggcaaagacttggcttccgggcccggtttccgca

SEQ ID NO: 49956 - DNA, 479 bp, Mus musculus
  source 1..479: mol_type = other DNA
tccaaagcttccaagggaactgtgggaatcattcgagactaaactgttactatttatacaatcagatgttctttaaaatacaaaggtcattgtgaactcactgcctgaggcccctgaggaaatgtcgaccactggggccccctggacccagatgtagagctctgtttcggtccaggcctcgggcgagatgtcccgcccccagggacggttgaggaactcaaaggccgtcacgcgcgctcgggagaaccccagcttcgccacctccccctctccgcaggaccccgcggaactgagcggaagccggctgcggaaaccgggcccggaagccaagtctttgcccgaacttgacatggccaccattgcccaggctggcgaccgcagctggcgcttcccgcccggagcggttctgcctcattctcgcgggacgctgacccgcgagcctcaattggggcggggcctcggcgacgcagtcaagtagc

SEQ ID NO: 49957 - DNA, 473 bp, Mus musculus
  source 1..473: mol_type = other DNA
ccaagtcctgggttgctcttgggtcagtgacttagcacacaacagttgagctaatttcactggtgtcttaagaaaaagcacagggagactgctgtaggctgtgtctacttgagcacaaaggacctttggtagtagctaaagggacactttgtcagatggccttagagcaggctaggagcatgagatctgagcctagctgatgggcgaacactcaaggtgtgctccgtcgcccagccacgtgcgcatcgtggcgcgcgagcagcgggtgacgcacacagagctagtgtcagcgtaggcctcagggccgcacgactgtcctcccggacttccgcttctcagagggggccgactcctcctcgcggagccggagagtgaccttcctcagcgcggcctggggggcgaggctcggaaggccccgccctacgctgccatgcttatgcggccccgcccgcgctgccggagacataaggggg

SEQ ID NO: 49958 - DNA, 602 bp, Mus musculus
  source 1..602: mol_type = other DNA
tttcactggtgtcttaagaaaaagcacagggagactgctgtaggctgtgtctacttgagcacaaaggacctttggtagtagctaaagggacactttgtcagatggccttagagcaggctaggagcatgagatctgagcctagctgatgggcgaacactcaaggtgtgctccgtcgcccagccacgtgcgcatcgtggcgcgcgagcagcgggtgacgcacacagagctagtgtcagcgtaggcctcagggccgcacgactgtcctcccggacttccgcttctcagagggggccgactcctcctcgcggagccggagagtgaccttcctcagcgcggcctggggggcgaggctcggaaggccccgccctacgctgccatgcttatgcggccccgcccgcgctgccggagacataagggggccgccgcccgcgcgcgagctgcgcgtgcgcagggcgggtgagagcgccgtgccgcggaacgccgtgcacctccgtccggacgggtcgtcgtccccgcgcgccaccagcccttggtgactcgggcggaaggaggcggagcttcaggcggccccgcctccgcggaagctccgtggtccaaaaccc

SEQ ID NO: 49959 - DNA, 247 bp, Mus musculus
  source 1..247: mol_type = other DNA
atggcttgggccacacatgggacagggacttggcccaagccaaccccaaccccggtcctgttcaagtgtcctggaacagcttggacactaggtctcccttgggtaccacctccattccctgggaaggcaaagatctggccctctgacggtacagtgtagcacagggactcagcctccccaataggagggataaaatggaatcattcccacacacacacacattccgtggcccgtttgtctgggtttt

SEQ ID NO: 49960 - DNA, 484 bp, Mus musculus
  source 1..484: mol_type = other DNA
tctgcgcacagaaggcttactctgcctaccctgatctcagtagacgctcggcatccccacctcaggcctaagtggaggcttctcgtggcatgacccaggggactcctgacgctgctccgtcgggggacctagtccccggacatgggactggatctagaaccaaagctcagtgtgagtgccacgctgctgccagcggattcctctcgcagcgtgcgtccacgaagccccacaccccgagtggggcgccgcttagcacgccgaaagccccgctaccagcgccaggagtctgcacaatgcatggtgcaggcgagggcggttgccctgagcaaccgcaagacgcctggccgctctgcccgccgctcggccacagcagcacgcgctttagggcgggtcccaggtgagcactgcctgccctcagacgcgccacgcctgccctcgctagtgcccaggtccccctcctacgcagtcgattggaatcccagac

SEQ ID NO: 49961 - DNA, 463 bp, Mus musculus
  source 1..463: mol_type = other DNA
cctgtgtgtaccttatgtccacagaggccatagtaagtcaccatatggacgctggtaacctctgagccatctctccagccctgggtgaattgtctgtttggttgacaagctaagataaccaaccatttttttgcaatgtgcacaaagaaattgttgctgtaattgccagggtgccaatgtctccaggcaaatgaagcacattcatgtcccttttctctgcctactgagcaggaataaaggctgcagtgggaccattcctgccaatcctgctgccatgggaacccatgctggaattcccagctttggtgttcggggcccaatactggtcaggatccaaatccagcgctgggctcttcctttcctattgggaaagctaatcaaggagagcacttctaggatccactcccttaatctcctcattaaaattcaggaagctgctgcccctggctgaagtgcagacttc

SEQ ID NO: 49962 - DNA, 338 bp, Mus musculus
  source 1..338: mol_type = other DNA
ctggcaggcctagaactagacctggaagtcacagaaatctgcctgcaagttttaagaacagaagtcatccaaattttactctctaagactgataaaatatgaaattgcgattcaaattgtataggatgcaccttaaccaaaatttaaagagaaatctatagcttgtaaatgctgtcttaaaagcgagcaaaacaaaaccaaactttgggatgtagttttgtgtagcacagcctaaagcattgtgaaagcacaggtctcctaagtggattcagcagaagcgccagtctcttgcacgaggacctagaaccccattggctggtttctaccagcgcatgcgt

SEQ ID NO: 49963 - DNA, 749 bp, Mus musculus
  source 1..749: mol_type = other DNA
agctggccttcactgtctaaagccctggcctcctctggtctgtctctgggagcccagccactgcaggacccgggaaaacctgctcaggcaggacatattttacctaaagaagcctggccagctctcccggggacctggtttctgtccacctggagatgccccggaggagcctgcaggctcccggctagcagtccactgtgccagagccctgctggcatcctgcccccagagtcttcctagggcgacaaggcccagggacagctgcgtcgcacaagaccagcggacctccagcccctccgcttggggacccaaagccagcgagggcgcttctgagcctccggggtcctctcggggactcccgagcccaggagcagagcccaggagcatctacaccgtcctgggtcagcccgacccggtgagctccggataccctggtcttcgcagtccccacctgcagcccgcgccctcccgcccgcgccgtcgaggcgcgaggagccccggcccgcccgcccgcccggtcaggccacggcgtaccgagagaggcggcggcgctcctcagccggcctccatgcgcgcgtcgccgggctgacgggctgggccggggcggggcggggcggccggacgggccggacgggccgagggtgcgggccgcgcagcatgccgggaaacacctcccagggccgcgcgcgcgaggccccgcccccgccggggtctaagcgcagggctccgcctcccggcccgacgccccc

SEQ ID NO: 49964 - DNA, 395 bp, Mus musculus
  source 1..395: mol_type = other DNA
gcctgggtgagggcttgccagcgcagccaggaatcctaggcatggggagtgaatggctgctcaccacccgcagggagtaccaggaggagtcaggcctcacgggacagcagtccctccaggccacggtcacaaaagtttgtgtacagtagctcctcccagctccacggatgccgacagtgggtcatcacagcgtgtaaaggggcgcccctgggtccgggacatggctgcagcgctcacacggcagcctctgcgcctgcacaggggggaccagggcttggcccaaccctgatgcagaactcggttcgtttcatttaaaaaaaaaaattttttttttctgcaagtcatcgccaacgccgcagctacgtggagggtgggggggctgggggcggagccac

SEQ ID NO: 49965 - DNA, 530 bp, Mus musculus
  source 1..530: mol_type = other DNA
tgcctggtgcaggaagaattctcttcctcaaagtggccgacttccaggaggccctttggagggcccgtgccagggcctgctccaggtcgtcactgcctggctctcacaggagggtactcaaatggagacgtgtccattatgggctcacctgatcaggaggacctgcagcccggagacctggcctgagtgggccaagtggcctctctccctggggccccgcccaccctgagacctccgcagtctccgggcctgactgggccaggaaaccagaagggcgccctgacggctccctagactccaggccgtggtgcggacggacgccgtcacacagactcgcctgtggggggcccagcaccccgcggtgaactggagttgcgctctaggacctgggggcgtcgggccgggaggcggagccctgcgcttagaccccggcgggggcggggcctcgcgcgcgcggccctgggaggtgtttcccggcatgctgcgcggcccgcaccctcggcccgtccggcccgtccggccgccccgcc

SEQ ID NO: 49966 - DNA, 443 bp, Mus musculus
  source 1..443: mol_type = other DNA
tgcagagccaggtttcagataggctcagaatcccagctggaaccattgcccagccaaattattcctgtagcaaatcttgggtggccaggacttctggcccttctctggacagaacagatgaggaaaaattatattccacattataaaaacatatttgtactttattttaaaaagggattgctggctttgtttacttacctatataatcggctggataaagaggagatgaaagacacatctttaggatgctaaactactgtcttagattgttagctgtctgaataaaacagtcaaaatctgtttctatgcatgtgatggacagtaccactcaaacccacacttggagtagtccagtctggcatatgtccttcggacctcggtggtgcacaggtgcctgcgcggctcgtagccgggcgtgcctcccaccagcccctaactgggtg

SEQ ID NO: 49967 - DNA, 321 bp, Mus musculus
  source 1..321: mol_type = other DNA
ttcacaacccagggtccctgagattgggggttgttagatgagagtctgaggctctgctattgtccctacagacaactggagggtttctgagggcctgcccaggaatgcttcggagcccagccatacgcctgcttgcaaggagcctggcgcaggcattgcatggagaaacacctcccagtctgggtcctttctcgaaggccactccagaggagatccagactcgggccccagcgaaccatggcccgagacctacgtcccgtctgcggcccaggcgtgctgaggcctcgcccacttagggcgggccgtcgcgtgggtgtgacg

SEQ ID NO: 49968 - DNA, 339 bp, Mus musculus
  source 1..339: mol_type = other DNA
tatggaaatgtgtgtgtgtatatatatatatatgtatatacatatatatgtatatatacatgtatgtatatatgtgtatgtatatatgtgtgtatatatctgtgtgtgtttatttgtgtgtgtgtatatatatatacatatatacatacaaacatacatatatatatatatatatatatatatatatatatatatatatatatgtatagtcttagctggactctgtggcctaaactaccaggttagggtagctatggatggcctgaggacaggcagccctgtcttcctatccacggtggcactgaagcgcgcggggagccctaatctcgcctaggggcg

SEQ ID NO: 49969 - DNA, 307 bp, Mus musculus
  source 1..307: mol_type = other DNA
gctgctgattcatggcagcaggcagtcctggaacagctccaggagcacctggttcaggtctacacgggaccccagacattctgggctttaaagaccaagtccaatgcttgaagcggccactccacataccagattgggtaggataggacccatccctctggatcttagactatccctcctccatatagaaggaggcgaacggatcagccccgagactgagctatggagcagctctgcccaaccccggaggcctcctcgggtttccgcaggggccgagggcaggcgggggtgcgctcagggcctgggg

SEQ ID NO: 49970 - DNA, 309 bp, Mus musculus
  source 1..309: mol_type = other DNA
atgaactatgcctgccagggttggtagacctccccatgtggggaccatacttgtggccccaatcatcgtcttgtctcctgaaggctccgtcacttactaagacctagtaagtctactaggcaaggcgccttcctaaagtattatcaccacgtgctcaagaagtttcatcgtcacccccatgggagggaagcaggctttttcctcggtctccgaggggcaggaagctgtgcgtctgttccccgccctccggtctccaggctggggaaatccgccgggcctcggccccgccccgccgtcccgccctgctgc

SEQ ID NO: 49971 - DNA, 485 bp, Mus musculus
  source 1..485: mol_type = other DNA
aaatcacggtgggaccctgaggcacctaacctcagggctgactggtcaccagccaggcaagcaggggtcctggacctccaggaagttcctctactggacagcagcaggaagcattagctggctgtgcctggcgcctccagttctctcgctgccagagcaccatagaggtcaggtgctctttgctcctgggcctggccaagcaggtcactcaaggccttgtttgttcgaagtagaagggagctgtcacctacagtgcacaacccacactgggaccggagtaccccagcctcaggtgtgtgggccagatgtctggaaggcttccctcctagaatcctacacccctgtgagcttcaagcacagggaggggcccacctggcagatttcctaggaaggcccctggggggcagtagctccaggttcaagccttgggcttactggcacagccacacgtaagcgggtgactggttaggtttcagctgtgctga

SEQ ID NO: 49972 - DNA, 474 bp, Mus musculus
  source 1..474: mol_type = other DNA
gtggctcacaaccacccgtagtgagatctgacgccctcttgtggtgtgtcagaagaccgatacagtgtacttatgtataataataaatctttagaatcatacataaaatgaataaataaatacatctttagttttttttgttttaaaaaggagagcaaatctggcagctattccagggtatggggtttggggactagttccaaaccttgtccttacggtactgtcctaccctatagtcaccctcgggaacgggatgagcgcgtggtcccgtggcctcgatctggcccaggcgaagccacccactggtgccgggccgcgtgcgccattcagttcggcctggggcactcccggggttgtgcccagcctgagcgaactccgaaacgcggggtacgctagggacgccagccgcccctccttcccaccctccccgccctccttctcccctggcgggggcggggccggcggctcccgcgc

SEQ ID NO: 49973 - DNA, 428 bp, Mus musculus
  source 1..428: mol_type = other DNA
ttttgtggatgctcaaacctaggcaaagccatggtggtggccagcattcagatagagccttcctccaactattgtcatgcagggcacaacttgccaagagaggctgcctgtctgcctgcgcccaattatctgacttaggggaatcctcaaaggagcctgggcttcagtctgtaagagcactggctgctcttccaatggtggctcacaaccatgatctggtgtgcctgaagacgcagtatattcatatacatacaataaataaataattcttgaaggccctagattggcaagccctcctggggctttggatctgtaacagggtttccaggcgtctgtcagaacataggtggtgactctggagggggagttggtgctctgctcacaacagcacctttgtgacacggccgcctgaccgcaccaggtgcttc

SEQ ID NO: 49974 - DNA, 256 bp, Mus musculus
  source 1..256: mol_type = other DNA
caaaggcagcgcaggctgcccctctttgctagccaaagtaggcacactagcctggagtggtgggacgcgtgggcgctctcggaggaaacagagcccccattctgcacggaagtgcaagaccaggtatgtccagtcacaaccctcggccgggttggatacccctggggggggggtggtgcccaacataattctatgttgcccaccttctccggcggacgctcctctagcgccagggggcgcgcggctgctccggggc

SEQ ID NO: 49975 - DNA, 249 bp, Mus musculus
  source 1..249: mol_type = other DNA
gtaattttatgccttagagtttctatagatgggcagtgcccagtctgccgccagcttggtcagtagctggcaccccttggaccagacataaaagctttcaggcccccactttccatggggtgctttgctgagcaagtggaaagctatgcttcagcctgaacgccagcatgcagtgctagataatcagctaattcatcacgttttgtttttttctgtctattttcaaagaaacaaacgaaacaaaaaaaa

SEQ ID NO: 49976 - DNA, 498 bp, Mus musculus
  source 1..498: mol_type = other DNA
cctgatgaagccaaggagactggactggaattcatgaaaggagactctttatacacgtacactgacttctccagagcttgtctttcagttctcacagaaaactaaatcctgtattactgcaagaggcctggccaccctgttggatatcccatccatccaatggttttttgcacggcagggtgagtggcgaagccatgacactcctccatcccccagctgtttgcttcaggcagactgacgcccctgaccctcggagttaggctctcccaagggtgaggtccattcagttccgacggggaagtatgccctaatcctgaccggtggtgcttcaggtcgaaatgtcggccgcgggaccagggtagctgacccgccccggccgccgtaagcttcacccgccagtaggcggggcagcgccctctggacccgccccatgcggagtggcccaatggaagcgcactgtgccaggtcccgcctacacgggaggggcagaactgcgca

SEQ ID NO: 49977 - DNA, 355 bp, Mus musculus
  source 1..355: mol_type = other DNA
cctagcatgtgttgacacattcaccggaaatcagtctcattttagagattaatttaatttgaactcatttcaacccatgtttcttgtgagttcgaggccagcctggtgtacaaagcaagtcatgatggctcacagccatccgcagtgaaatctgatgccctcttctggtgcatctgaagacagctcagtgtacttacattaaataaataaataaatagacgagcgcgcgcaccgctctgggctggaccgcggccgccactctgtgcctcctccggtggccccgcccccggggcgcgcccccgcccctcccccgtccgcgcgctcgcccgccggcccgctcgctcgctcgcgcgcg

SEQ ID NO: 49978 - DNA, 281 bp, Mus musculus
  source 1..281: mol_type = other DNA
accaggctggcctcaaactcagcctctgattgcctttgtcttagtttctgtttaaagaaaactttaattaggttccttgtcagttacatacaaagccttttactccgcacatgtgacatctctcctaaggataagattctaggataaccatcctggagtgagagcataaaggtctcgaggtccttaacgcacctaggagacacccttgtgtgattaacacccctggccaagagggagtcagaggtctggctacagagtttgtgatacatttgtctggtagt

SEQ ID NO: 49979 - DNA, 303 bp, Mus musculus
  source 1..303: mol_type = other DNA
gaaccagatctctctccattactgtaagagtcctggggggaaaacaaaaagtttgcttcttaatgtattgtattcccccaaacggaaataatgtacttgttggagaaaaatgattatcatccaaccaaatcgaggggggtggcaatgcagcctgagcgcccaggccgatgccattccctggcgccattttggtgctcccgccccggaagtacgtagccagggcactgcgcgcacacgacgtcaggaagcgggcccgacgggggcggggcctacaccgggggcggggctccgtgtctagggggg

SEQ ID NO: 49980 - DNA, 358 bp, Mus musculus
  source 1..358: mol_type = other DNA
tgggggtggtgcagaactccaggcacctcaccactcaggaaactgaggcaggagttacagaggctgtacgatctacaagactcgagccccgcagttcacgatgctggggaggaccatgggtcaaagtccccaggtccccgacccgcagcaccggaagccttgtggctggagcttcgggatcagacactcagactacctagcccccgcctgcaagcacgcgcgcacaggcgatctgtcgcttgcctagagatctgtcgcacatgctcgggacccatagataccaagaccccagggaactgggcagagcgaactccggtccggagcgctgtaacccgacccttaaaggtcctggcatgcc

SEQ ID NO: 49981 - DNA, 369 bp, Mus musculus
  source 1..369: mol_type = other DNA
ccctctgggccatagaatgtcagggccaagtcttagacatcttcccaggccccggagatgctgcttgcagatgttcccatcccaggcagggcttgctccaacaccaggttcagaagacctgattctgggtaagggaaaggcctggactttacacccgcctcagagggcagctgtgggacccgggagctcgccatgtccgctacgcggtcttgccgactgcccccagcccggcctctggcccacgccgcagccggaatccgtcagtccggtcgggtccccccctagacacggagccccgcccccggtgtaggccccgcccccgtcgggcccgcttcctgacgtcgtgtgcgcgcagtgccctggctacgt

SEQ ID NO: 49982 - DNA, 254 bp, Mus musculus
  source 1..254: mol_type = other DNA
gccccggagggtggggccaagcccttgggctggttgccaggaagcccggagcaccctgtgcccctaaaagggccctccccagggcctcggccatggatggcttgtccacagtggagctggggaactcctaggaattccttccataagcgcccccaccagcgctatgggctcagaagtctgggtcggcacttggcggccacatcggccccgcggccccatcgcggcgctctacagaggcccggggccccccagcg

SEQ ID NO: 49983 - DNA, 248 bp, Mus musculus
  source 1..248: mol_type = other DNA
ttgcaaaatgaattctaaacatcattaaaatgttcattgacactgtgtttgagttttgatcccaaaggtttttttaatttacttttaaaaaaaatttgttcaattgagaatgttttggaccaaaacattagttttgcaaatgttagccccggagggtggggccaagcccttgggctggttgccaggaagcccggagcaccctgtgcccctaaaagggccctccccagggcctcggccatggatggctt

SEQ ID NO: 49984 - DNA, 274 bp, Mus musculus
  source 1..274: mol_type = other DNA
cagagatctgccttccaatcgctggcatgaaaggcctataatgctctttttttaaagatttttaaaaaagatttatttattatatgtaagtacatgtgctcttagcccataagtactgagtgtaagtgcacacaacactactggacatttaacaaatgtttatgacagacaaggccctgcccatgtggctggcagcccagggcctccccctggtcccgtccttaggaggcgccaatgagggcgagaggccagccccagtgggcggggctggcgg

SEQ ID NO: 49985 - DNA, 379 bp, Mus musculus
  source 1..379: mol_type = other DNA
ggaaagctgggcaggccctgcagaagggccagctgtcatcctgaggcaagtttctcctggagcctccggggcaggaccttggagggacttgcccaaggtgggcatctgagagccccccggggctatgatgaacttcacaaatataaacttaaacaaatacagacttaagtgattctgttgagtgagtgggaggggtccattccgctttagaagtaacaactactagcagtggtccctgagggccactgtcaacttagggaaaaggctgctgagctgactcctggtgaccttttcccactgatctccaccccaatttgggagtgggtgtcaagttcccagtgaggacagggcggggcctggcaggggtggccaggcctga

SEQ ID NO: 49986 - DNA, 376 bp, Mus musculus
  source 1..376: mol_type = other DNA
taagatttatttattatatgtaagtacactgtagctgtcttcagacgcaccagaagagggcgtcagatctcaagtgcgctttctaaaaaagaattatttattttttatgtgtatgagtacactgtggctattttcagacacaagggatcagtgctctttagactttaaaggaaagtcttttcttaactctaaaacctcatccttcagatgaattatggattgtgttcttcccgatatttaacaggagagagacacactctctcgagaaagaaaaatactttaagttattgtgttgggtgaaaggggaatcgttagaacctacgttttgtagagtgtctcacacagcagctgttagcgctcgggattggcctacgtc

SEQ ID NO: 49987 - DNA, 267 bp, Mus musculus
  source 1..267: mol_type = other DNA
cttcttagtaagcctatgcctcaacttggaggttttccaaacagctgctcagttgatgaacatagcctcaactcacacagagaaagtgttggcttctgaatgctggactctgattccagacgagacagagtcactgtcccggttccagcacccagtggagaacagctccgacgagctctgatcagcacccgggttcctgaccagcactgcacaccgctgtaaccagaggcgcgcattcccgggccgcgttggtcctggctcctgggt

SEQ ID NO: 49988 - DNA, 267 bp, Mus musculus; identical to SEQ ID NO: 49987
  source 1..267: mol_type = other DNA

SEQ ID NO: 49989 - DNA, 395 bp, Mus musculus
  source 1..395: mol_type = other DNA
tatctgttagtctcccttaacagttaaaactgataagaaaaaaaggttatattcaataatgtataaatgaagagttagaaacaagtcatgttgtcttcccattagttcaatactttgtagaagggaaaggatttttttaaataatttgatacattgtgtttcacaaaattcaccaaaggtggcaaaaagccagcagccaatcagatttgtcttcctggtttgttgcagcaggagagccagatagctgtagtgctgcactgctaggcagtcctgagcctaggataaggatcgggagcacgcgagcaatctccagcccagtcccagagcccgccccttctgggtcagccaattgtcacgtgaccgcgggcgtatccgagactgcctgagatcgacgc

SEQ ID NO: 49990 - DNA, 421 bp, Mus musculus
  source 1..421: mol_type = other DNA
cacctcctccaagggcaagcccccttgggaactgggccccagaactccagggtacatgcctgatcgaactgggagccggccagtcaggagggcggccctatctgcgagtcccacagagatctcacactctgttgggcccataggagccgaggtccccgagatacagatgggcctgtgtcctcagtcccttggtagggcttgagcgcccaggccagcccctacctgaggccccacttctgtctgtaggtccactctctgaagctccatgtaactccacagagccccaccctgttcacccagaggtgccagcacaggcttggacattgacccgggaggctccagcgccatgggacaagcgtcgatctcaggcagtctcggatacgcccgcggtcacgtgacaattggctgacccagaaggggc

SEQ ID NO: 49991 - DNA, 288 bp, Mus musculus
  source 1..288: mol_type = other DNA
tatccctttgcaagcaaggtacagaaataagagacctgcctcccaaggcatctctaaagttggccttcagtgctcagctttgaacagagctggcggcaggcagatacctctttccaacagctctaggtcagagctgagccccctggggttccccagctagcaacggaactgggccacagaagagctttctgcccccacttcacatgaggtgtgcagtagccatttcatcgggagaatcaataaatcaatgaccagtttactcgtcattcagtgtcacgtgttgtctgc

SEQ ID NO: 49992 - DNA, 430 bp, Mus musculus
  source 1..430: mol_type = other DNA
ttaaccccttaaaggcaaataaacagtgcctccattctgaagcttcaagggtctagttgtagatttgaaccttcttcaggaaatctacaaggtggccaggtccacagtgttcacgaaggactttgagatcaaaggacagatatgtatatagtcctgtggaatacagtcagggcaggggactggcacacataggctggtagcacagcacacacatgtgtgtgagctcaacccctgtgcacacaaacacatgtttgttactagatcctgagctcatggacggagagcagccatggctctcgtttgtacctgactgtgaagcacacattcatgtaagggaccatgctggccttgtatggtgtcccttaggactttaggcccctgggtcttaggcccatccccactcacatcgaggcccagagagtgtgggggc

SEQ ID NO: 49993 - DNA, 423 bp, Mus musculus
  source 1..423: mol_type = other DNA
gaggtagccacctgggctaatccaggatgtattcatggaccgcatagagcccaggactatggtctgcaggttctggcccccagcaccagagatttgaagccgaggcagtaacttaatctctggccaaaagggcagtgtcatttggcctgtcggggtaccagggagcccaagcatgtccaagaccacagtgaggaggccagaccactgcgccccgcctgcccttccctggcccaaagcctgggtgcccgcccacctctgggcagccgcccgcgtggggtctgcggggggcaccgcggactcagggcgcgccggccgccgccgcccgcagagggaggagctggcggaggaggcggggcgcggagcggccgtggcatggagcgagcccggcgcgcccgggagcgcagccccgcggccccggagccc

SEQ ID NO: 49994 - DNA, 734 bp, Mus musculus
  source 1..734: mol_type = other DNA
gtgaggaggccagaccactgcgccccgcctgcccttccctggcccaaagcctgggtgcccgcccacctctgggcagccgcccgcgtggggtctgcggggggcaccgcggactcagggcgcgccggccgccgccgcccgcagagggaggagctggcggaggaggcggggcgcggagcggccgtggcatggagcgagcccggcgcgcccgggagcgcagccccgcggccccggagccctgagcgggcgcggctcgtgcgctggcgggagcgggccgggcgcggcggcgcggcccatggagcggccccgggccgggcccccggcgggcgggcgggcggcgggcgggcggtgggcgctgcggcggcggctgcggtgaggccggcggcggggccgggccgtgcgccatggaggccccgggcgccggcttcgcgtgcccgctgccccccggcatcgcgtccagccccagtgggcccggcggatccggccccgcgcccggccccggcccggcgtctcccgcgccccccgcgccgccgccccggggcccgaagcggaaactttacagtgccgtccccggccgcaagttcatcgctgtgaaggcgcacagcccgcagggcgagggcgagatcccgctgcaccgcggcgaggccgtgaagggtaggggcgcgagccgggttggggggcgggccccggggcacgcggcctcagcaagctgctgtgccggggtctcagtctctggc

SEQ ID NO: 49995 - DNA, 461 bp, Mus musculus
  source 1..461: mol_type = other DNA
gagggatgtacagtcatttggatatccctacgctatgccttagtagtcaggtggcttcttgggataccttgagtctgtagatgtggaaggtttcgaactggggacttcctcattgaggtgaggcccgtcccgaccctgtccagcaggagggggcgagagcactgccacctgaagaggggacagctggcctctgactgtctcatccgtcagggtggcaaccgcctggtgatggctgggctttcagacctttgacttcaaatcacattgctgcctgagatgagagtgttagatgcctgacctctgaccaggcctctgatccctgatcggtgctcctttccgacgccagcagctgcctggaggccgggttgtcatggcaaccgtgaggttgacgctgctgctgctgctgccacctgagggaagaggaaaagcgtcttctccccgcgccgacgccaaagacgcgg

SEQ ID NO: 49996 - DNA, 400 bp, Mus musculus
  source 1..400: mol_type = other DNA
ggtctgcagagtacagatggtgtcagatctaggtctcagacatgctgactcgagggcggccactgtcaagcagcggcccaccagccggaggatcacccctgctgagatcagcgtaagccagccttgggccagggctctgggatggtcaggtccgggcctggggatcagagatcccttctccagaggaggtggaactaccttagtcagagtctgtgttactctggctaacacagaggagggtccacagctttgccgagcctatggcatctgtctgctcagactatgcccagggtctgaccccaaatgaacatgggcaccggtgcctttgggggtgctccagtgccctggaacttccatgttttgagcgccagggcctcccaggcccagagaagctgccggg

SEQ ID NO: 49997 - DNA, 290 bp, Mus musculus
  source 1..290: mol_type = other DNA
gttatataataaagtatgacattcatgtctggatgggtaggagcatcgccatcttgtgacacctttccatactatagcaacacttctgtcatactatcttctgacaatcagatatattaaaaaaaaaagacacaagtcaagcaacttcaaaatggctctttgaaagtgttcttatcagccaacagaacctgatttctcaccaccctgaggtcaggagttaatcgaggaggcctgcctggcctaactgctgggggtcaccctgctgattggccagaaggctgtggagcttt

SEQ ID NO: 49998 - DNA, 393 bp, Mus musculus
  source 1..393: mol_type = other DNA
tgtcgaatcggatttgaataaagtgtgcatagaactagtttactgtttatgtttaacgtgtttacaaaactgatgagcagttatgggtaaaattacagagcagtagttctcaacttatcagaaaaatacagatattttcatcactacagttatgaagtagcaactggaataatattatggttgagggtaaaagttttacagttaatgtctgtcgaaatatcagatttcttgtgtttttacaagtaaaaatatgtatatagaaaatgtatatatgctgaacttgtaaatctagtacagacccagacacctctggctcagcgcatggtggtctctctcatcagctgctcaggaagaagaagaaactagatttagttgaggggagttctcacctct

SEQ ID NO: 49999 - DNA, 386 bp, Mus musculus
  source 1..386: mol_type = other DNA
tctacctgttagagggtagggctagcatcccctgcccctaccctaaactactccagcccaagggctggggggaggggggcttttccctagttgcccctccatatatagagagagattaagaaaatgattgagggcccccccccggggggggggggtatatgaactcgagtcaaataacctggacccttgagggttctcagaacacacacacacacacacacagtaggtgtgaagctcagtcttcatgtgggtcccccagcaactggagtggggagggggctacccctaactgcagcaacctgttgctggcaggcactgcgctagccagcccgcgcctcgctgaggtccttcgggccattgccggacagcccagctcggggtcctgg

SEQ ID NO: 50000 - DNA, 485 bp, Mus musculus
  source 1..485: mol_type = other DNA
atacaccaacttgaattagagaaatttgatgccccccattaaagccctttgttctaacaggctgtgaaaaagacttcaaaacaatgtcttcagagaagaaactagaatcaagtggcgtctctcagtcacgagttatgatttcaataaataaaaccctgatgaattcaaattttcctgttcacatcactgctggtgataacagtgttcttacctagaacgttcttgttccaagtcgtttaaaaacaaattgtaaacaggtgtcacacctgtcttctgattacttttatttaaaaataaaaataaagatccgcaggtgggaatagcttttcctttctttctttttttaaaagataaagaatcggggatatggagggcactgtcgcctctgcccccgctgcccgcgccagcctgccattggccgcgccgcccagcacccgggaggcgccgttctgcgcgccgccgcccctcgctccccgccggctggg

SEQ ID NO: 50001 - DNA, 256 bp, Mus musculus
  source 1..256: mol_type = other DNA
ttttccagaagcttcaaccatgctgaaaacatactttgtcttcctcaacttcatacatgtgagcacttttagagacagatattaatgactatttattacctatttttaaaaaatattgccctgtaaacgaatagattctttagatgagaggaaaagcattgtaatgatggttttagcgtctcacggcggcggcagcatcacctacacagctcccgcgcccccctcagcctctggccactctgagagctgcgagcag

SEQ ID NO: 50002 - DNA, 259 bp, Mus musculus
  source 1..259: mol_type = other DNA
acatttctcaacttcatacatgtgagcacttttagagacagatattaatgactatttattacctatttttaaaaaatattgccctgtaaacgaatagattctttagatgagaggaaaagcattgtaatgatggttttagcgtctcacggcggcggcagcatcacctacacagctcccgcgcccccctcagcctctggccactctgagagctgcgagcagcccgcagcgctgggcctctgagcccgcgttccgggctcgg

SEQ ID NO: 50003 - DNA, 539 bp, Mus musculus
  source 1..539: mol_type = other DNA
agattctttaaggaagtggctccaagtgctccaggtgagccagggctagagccagccacgctccctcctgaggctgggcgccctgctctccaccgccccctggcggccatcgccagaagacccgcagtgacgcctcgggtcagtgggggttacccggcaagctgcggcggcgccccgcgtcttgcccactcccagtcgcgcccgggcctcagggcagaaatccctgcggtttggcaagtgcgttgcaaggcgccgatcttgccttaaggagaccctcgcctaaaagtcaaaggctggtggccctggggcggggggcaatcgccggcgcctggggctctcccactagacggcgcggtgtctgtccgggtcacctactgtctctgcgccctacgcccagagcccccgagctgcagacccagtcaccgcccgggggctgccccagggcgggagcagcccggagcgccacttgggagaccgaggcggctttgccaggactggctcggtcgccggattcgcgacgaggtccgccttcccgtcgg

SEQ ID NO: 50004 - DNA, 487 bp, Mus musculus
  source 1..487: mol_type = other DNA
ccagtttgtcacacaaagggacattataaagtttttttttaccttccacctatgttgtctgtaacgatttaaaggtaagaaaataaataccataggccatctacccatgggtatacaaggttcaaacttctttctgaacccaatatacactgtgttctaggacactctcgatagcgacatttaatctattatactgttttgtatgaacccacatgtttatttactgaaatgtacggaacagtccacatcgggatcccggatttaccctgcccatggaaagcagttgtggaaactttgcatgtcgtgccacacgcgcctccgggagggggagggggggtcggctcgcctccgcgcggtgccgcgcccgcctggccgtgccgccggggcggggcgcaccggaccggccacggctgacgcagggcagcgcggagcctggcgagtgggggcaaggggcggcgccgccctgagtcaccgccccctcccgcgc

SEQ ID NO: 50005 - DNA, 294 bp, Mus musculus
  source 1..294: mol_type = other DNA
aaaaaaaagtcttgaagaaatgcttcctaaaaattgttttccattttaagtcacttcttaaagaactttattatcaggacaagttagtaccaagggatcttgggtttacaatagcagccaatctaatagtttcaacaaaacattctcaaggatacatgtttgcttagagacgggaaacttctgagggtttctaagtgccgctgagcatgctcaggaaatagatatttaactctggtctcaccgcccacgcagccaatgagacgcctgtgggtggagcctggccagctctggctg

SEQ ID NO: 50006 - DNA, 412 bp, Mus musculus
  source 1..412: mol_type = other DNA
ttttgagacacataggtactgttgctatctaaagtgaacgaggtggtcagaccagatccatccacgcctggacctgtcaagttgacaaaatgtggctccattccagtttgtcacacaaagggacattataaagtttttttttaccttccacctatgttgtctgtaacgatttaaaggtaagaaaataaataccataggccatctacccatgggtatacaaggttcaaacttctttctgaacccaatatacactgtgttctaggacactctcgatagcgacatttaatctattatactgttttgtatgaacccacatgtttatttactgaaatgtacggaacagtccacatcgggatcccggatttaccctgcccatggaaagcagttgtggaaactttgcatgtcgtgccac

SEQ ID NO: 50007 - DNA, 471 bp, Mus musculus
  source 1..471: mol_type = other DNA
tgattagtctctatctccggaaatgaaacaacataaaataatttacagaatatttaaatcaacgggacctcaaaccatttgaaattactttgtttcagatgctgggcaagaaatacgcacagctaaagttgctttacctctgggaatccacaggaagccttctcgtgagagaagagtgcaaatgcattttgaaactagagacaccagtgaccatggtcccaaattggtaggtgagtgtcaggcagtctcagccacctcggattggctctggatagcaagcagctcatctgcagccagaaggcaagcttccctgtgtcctggtaccctgactccaaagagctcttgtctccaggggacaaccccgcccacagagggaggtggcagcgtccagggggaggagttcttctctgtctccgcccaccagggggaggtgggtcccattcgcccctcccctccaagcgggcaagtgac

SEQ ID NO: 50008 - DNA, 299 bp, Mus musculus
  source 1..299: mol_type = other DNA
tccaagcctgagcaggctgccaggtgctgggaggcccgggcagcagtactaataactagttcaccatccttgagagctgaatcagagctcccagacattctttggggagcaaattactcctctccctatagggggaactcttaaaagaaaccgctttcctgaaaggggccaactgggcggtgtcctcctttcccaacgcccctttgcccccggcggagttcccagcggcgcgatgcggctgggcaggccgggctgagactgggcaggggcggtcgccgtcaccgtctgggcgcggctgg

SEQ ID NO: 50009 - DNA, 441 bp, Mus musculus
  source 1..441: mol_type = other DNA
ttggtagcaactgggtatcactgagaagcaaatagcagccccggagctatctctggctctccagggttaaacttgaactttgtacagatgtatagtccttaaatcagtgtctaagtcatgtcaacataattcattaaaacaataggaatttttcaataataaagttagtgtgacaaggatacattcctgtattgtagaatgtctatacctagatgataattacatatatatctctaaagaaataactatttcgtattagtaggcaaaggcaaagagctctttgtctcaaggtgagtcaatgtttaaaatacttttaaattgtcaaaagaagggcaattttaatacatcataatatttgagttccttgaagcattaagacattcatgatgatcaccaggcttgtcactccaactgctggtcagagccagtgttgagatggcc

SEQ ID NO: 50010 - DNA, 401 bp, Mus musculus
  source 1..401: mol_type = other DNA
aagaagtgggtgtcttctttcctcaataggtcctgagagaacacactacactggttatcgatcagtattgtgccattactttaaataaacacttgtcacccacggaattgcccatggcaaatgtcccccattttaaatacaggaccctatgtaagcaaattttggttaaatggtatatagagtttctacaatttttgctctgaggaaatctttcatgacctatgtggtcaatgagcccctggttgaatctccaggagcagagaatttttaaaagtcaagatctaagggtagccttctcagaggccctctgacccagaagcagaaggttttcaatccgcggactacaagggtgggctcagaaaactgcactctgaggccccggctactgctgtcaagtagct

SEQ ID NO: 50011 - DNA, 597 bp, Mus musculus
  source 1..597: mol_type = other DNA
tcttcctcatattaacttagaaaaaaaggaccagttttcatactgttggttgacagattgaagagtgctgggtaagaaaatggttctcacattgtagttttttagccccaaggcaagaatgtttccctctggatttatgagggaatcaagtgtgatcactcgtgtgtttaaaaaggctttgggaagacatgacttcatagctttcagcagcttcaggagcttatgtttgcacctctgtgtagaaacaccagacaactagttttagtccagaggtctttgagtagtggatgttcactaattatcagtagtatttctgcaaatactatgatggcattttaaagtgctaggacctgtttctttctttatagtgaatctaggcataattaaatgtacatcttgtttctttgaagcttaaatgctcagagataaaaagtaattatggtctagaatatttaatagagataatcacatgatcctgtgatttcgaatagaagggaccctttccacatcgccgaaatgaaagctaactattttagaataattcttctaagaactgtaaaacgcttctaatgtctctgcggtgacagagaaggaaac

SEQ ID NO: 50012 - DNA, 496 bp, Mus musculus
  source 1..496: mol_type = other DNA
aaaaaaaaaaagctagcttttcatgtaacaaagcactttctaatttgtttggcttagattccagtcaaaagaatgccctctgatttattttctaaagaaatgaagttatttttgtatttttttatttcctccatatgttttttgaaattaattaatttatagtacctaatattccaagaatataattttctggcgagtgctaatttaagaaattgatacaaacaaggtaatttttaatgagttcactttttaaattagcttgtgcaaacccaagattagatttttacattatcttcttttaaagacagaattttccaccttggtttctagaaataaaagtcatccatgtggagccacaccttgcaggcaatggggaaggaggtcaagatagatctggtcctttctccttcttaattgtaaagtgaaatgcaaagtgaaaaagagggttcatttatatgacatgttgccagggtttgggtgaattttcccctgttta

SEQ ID NO: 50013 - DNA, 602 bp, Mus musculus
  source 1..602: mol_type = other DNA
cagcagcttcaggagcttatgtttgcctctgtgtagaaacaccagacaactagttttagtccagaggtctttgagtagtggatgttcactaattatcagtagtatttctgcaaatactatgatggcattttaaagtgctaggacctgtttctttctttatagtgaatctaggcataattaaatgtacatcttgtttctttgaagcttaaatgctcagagataaaaagtaattatggtctagaatatttaatagagataatcacatgatcctgtgatttcgaatagaagggaccctttccacatcgccgaaatgaaagctaactattttagaataattcttctaagaactgtaaaacgcttctaatgtctctgcggtgacagagaaggaaacagtttgccctttcaaacgaacgaaaacagcagattctgtcgtttctgcccccaaagagtccagcttcgacattctgcagcttgcagatgtcatttcggcactgagaatatcttccctgagaggctgcagccgggctggagacttctgctaacacccattaagtgcattgaagactccaatgcatgaattatgcatgccctgctcattcttt

SEQ ID NO: 50014 - DNA, 541 bp, Mus musculus
  source 1..541: mol_type = other DNA
aagtctatgttcacctttgcatagtataaattccaaatataggcattacattagaatgtaaatatagtgtcagcatcctgtaatattatatatgactttaataaaattagcataaatactatatacattggtaatttatctaaggaagtcgattgtatttatctcatttttaaatatagatctacatgcattatggtgcttcaaatgtctatttaatggacatgcccttattatctaattaaaatatttattatctggatttattttctaaatttaaataattattaaatactgttgaaaacatttcttgtctttgttgcaaaacacggagttgtgaacgaagtaactcatttttttattaccatattagaggcttataccaacggagaaattaaatgtatgctcttttaaaaatgctctatccttaataaacagagatggtattgacacaagtgaattttgtttaaccacactacatttgcttcttaattagtgaatattcactgtcataaataatcaatgaggcactattaatattcat

SEQ ID NO: 50015 - DNA, 291 bp, Mus musculus
  source 1..291: mol_type = other DNA
ccattttaaaggttttgagccaaaagtactaagaataatcatagagtttaagctttgttacttcagcgtgacccagctcaaggcgaataaggctgccttcccagccttgtgtggatgggcaagcaaacagatttagggcaagggcctacagccctgggcgtgaaggccgggagagcgccagcgctcagctccgcttccgggtgcgctgcggaggcggagccttggccgggcgttggggcgtggcccggaggcgggacaataggcggggccaaccaggctggtcacgctgcg

SEQ ID NO: 50016 - DNA, 763 bp, Mus musculus
  source 1..763: mol_type = other DNA
cagggcacaagcaacctcgtctgccttacgtaggctcacgagcgtccgtaaaccggatcagaccctggtttcgtcacgtttgcaccgaacctctcccgagcctctgggtcgcttccccgatgacagtccccgccgcgccgggcgcacgcgtgtctgcgggcgcctgccatcgcgcccttcggggcgtgcgagccacggccggagcgctccggggcagccagcgggcgggcgagctggagggaggcggcgccgcgaactcgccgccggtgctgggccgcgctccccgcgtttgtctccggcgcggccgctggttggccggcgcgggtcacgtgcgcgcaggcaggagtttccccgacagctggaggctgcgtgggatccggcggcggcggcggcagcggcggcggcgacggcggcggcggcggctgcagctcgcggcgcggccttccccgccccctcgccggcccctcaccccggcgctgacagaccggcgcgcgtcggcagcgagccccaccaggtagggcgcccgccggcggagcgcccgcggcccggggtcccgtggcgtggcgtggagcggcgcggcgcggggcgcgcgcgagagggggtgcggcgcggcgcggcggggcgcgcggctgcccacaatgggccgcgatggcggccggggtcagcggccgcgctcccctcccccgcgcggcgccgggcggggcgggggtcgcgggccgggcggggcggggcgcggggccgggcgcggcctgcggctgacccc

SEQ ID NO: 50017 - DNA, 477 bp, Mus musculus
  source 1..477: mol_type = other DNA
gcagccggaggtgaagccgccgcgggctcgcatcctctccgcttcgcctctgcgccgaaggtaagctcccacggcgccgggcccaggagacggccgcggcccgggcctccgcctcggcctccgcctcggcctcggcctcggcctcggcctcggcctcgaccctgaccccagctccggccccaggaacgtccagccggggttagcatttctcagggccagcggggcgccctccggggtgccgagttttaacagtgacgttgattactaagcacattgataaatatacaggttaatgtctccatgtaatagagtgtcatttcatgatttggttgtgcacgaaatttaaaaatctaaagaactttatcaaaatgtgaactctgtcgtcatggcctacctatatcagtaatccatatatacagacgtagatacaggagtttttttaaaaacgaaacatcttttccgccctaattaagtcag

SEQ ID NO: 50018 - DNA, 422 bp, Mus musculus
  source 1..422: mol_type = other DNA
tgggctccgggctgctgacacgcaggttcccagggagtagtcaggcctgcgtgctggtggaagttaagtttaaactaccgggcacgcctttaatccctgcactctggaggcgaggcgggcgggatctctgagttcgaggccagcctggtctacagagcgacagccagggctaacagagaaacccagtgcgtacccattccatattttcagaaaggaaagtcactgtgtgactccaactgtccccagaagcggaacctgggtctcactctccaggaaacgtccgcccgcccgcccgccggccgcatgcgcccctcgcgcctctgcggagagccactcgctcatgctgagcctccgcctctgtcgccgccgcctctgtcgccgccgcctcagccgccggtgaaaccccgctcgccctaaaggca

SEQ ID NO: 50019 - DNA, 541 bp, Mus musculus
  source 1..541: mol_type = other DNA
acgcagtgcctgaactgggtccccttcaggaagggatggatttcatctctccttgggtacccgccagatcggcgaggtggcagggcacaagcaacctcgtctgccttacgtaggctcacgagcgtccgtaaaccggatcagaccctggtttcgtcacgtttgcaccgaacctctcccgagcctctgggtcgcttccccgatgacagtccccgccgcgccgggcgcacgcgtgtctgcgggcgcctgccatcgcgcccttcggggcgtgcgagccacggccggagcgctccggggcagccagcgggcgggcgagctggagggaggcggcgccgcgaactcgccgccggtgctgggccgcgctccccgcgtttgtctccggcgcggccgctggttggccggcgcgggtcacgtgcgcgcaggcaggagtttccccgacagctggaggctgcgtgggatccggcggcggcggcggcagcggcggcggcgacggcggcggcggcggctgcagctcgcggcgcggccttccccgccccctcgccgg

SEQ ID NO: 50020 - DNA, 222 bp, Mus musculus
  source 1..222: mol_type = other DNA
ggttggttgtgggctttcctcaccaccccggaccaagcattcaaatcctcgagcctatggggcatagaccatgttccctggcccttctcctgttccagaatgctggattatgttctaacatttgtccaatgtcttacagatcttttttagataatattttgatattttaattacaactgttcccccggagtgctgggattcaaagtgtcactacactcttaa

SEQ ID NO: 50021 - DNA, 580 bp, Mus musculus
  source 1..580: mol_type = other DNA
cggaaaagatgtttcgtttttaaaaaaactcctgtatctacgtctgtatatatggattactgatataggtaggccatgacgacagagttcacattttgataaagttctttagatttttaaatttcgtgcacaaccaaatcatgaaatgacactctattacatggagacattaacctgtatatttatcaatgtgcttagtaatcaacgtcactgttaaaactcggcaccccggagggcgccccgctggccctgagaaatgctaaccccggctggacgttcctggggccggagctggggtcagggtcgaggccgaggccgaggccgaggccgaggccgaggcggaggccgaggcggaggcccgggccgcggccgtctcctgggcccggcgccgtgggagcttaccttcggcgcagaggcgaagcggagaggatgcgagcccgcggcggcttcacctccggctgccttccgcggcgcgcaaaagcgcgggcgtccgcgaacgcagcgcggtgcagcgctccttccgctcccccaaaccccgacggccccgggccggaggctggcgcgccgggcgacgtcaccg

SEQ ID NO: 50022 - DNA, 320 bp, Mus musculus
  source 1..320: mol_type = other DNA
cagagccaggaccctttggtctctgtcactttaaaataaacctgcttcttcacaatttttaaatcgcagttacaataggctattgttctcttatataaataaatatatgctgcaaaaatctgtagcttagaatgtggattctcctgattgctaattcctaatgatcattagtaattgtgagtttactgataaaaaataaatctccggctctaagccacaggaattgcttttagggctgggggccctagcccagcgtgtggggccgcgagttcgaggctcagcaccgcccccttgcacactcgcctgcgcccgcgcgtgca

SEQ ID NO: 50023 - DNA, 452 bp, Mus musculus
  source 1..452: mol_type = other DNA
gatgcttctttcagcatcttggaaggctttgtagggacacatgtcaagttgtcattaccagctgcagtgggctctgccctctgagatatgggatcatagtgtccattccacggccctgcaaatgtcatgggcgactgagcctgacagcccagcccagcccagccctgaatgaagctttggaccctgcatctagtgcaccctgctacttggtcctggccccttaagtaaggccagtcagtttaattaacaaccctaatagggaccccatcaaagtgtttggcggggcggagactggcgggcctgcagaccgcagcccggccggtgctgcctcgcgggagggatcgcggccccgcactgtgcgcgtgggcgcgcagagccgcctggatcccctgcgtccgcgctccgggatttcgctggcgccggcgcgacggccgggggcgggtgctctgcag

SEQ ID NO: 50024 - DNA, 445 bp, Mus musculus
  source 1..445: mol_type = other DNA
tctggtaatagaagtaattgcagatcctgcaatgaaaagaagctgtttttctccagagggctttcttcataatcacatgtgactggagttctggagactccaatgacctccttgaacttcctcagagataggttaatgcagtcgtctccctgcacacagggacccggatagcatccggttacggatggttattgcaaggccccggtctgacacttgtcactggtcctggggacgcggagctgcagccagggaggtcccggtgcgcgcgcccgcgggcggggctgcgcggggcaggggctgcgcgggaggccgagccgccgcgcctcccgctgattggtcgaccaggtcctggggggcgggccctccgccgccccgcgcgccccgctactctggctcggttcccgctgggccgggcagcgagcgcttcccagggtggcgcgggagc

SEQ ID NO: 50025 - DNA, 492 bp, Mus musculus
  source 1..492: mol_type = other DNA
ttgtctgcagtgcagtcaacagaagtctgtgctatgttttttgtttgtttctgtttgaacagggaacacaacaaagacaagactgggaggcccaagtttggccggagtgatcagatcagtcttgaaactctttggcatacatcttgaagaattactcccagaaacggaaaaatcgatttttttttttttttaaaagctagcttcctatgctccccatagcgagcaagcggacactccggcggcagagcagcgcacagaggctgcggggctccccaagcctcctctgccccggcccgggacaaggcgatcggcgtcccgccacggtccggcgaggactcgggggtggactgcgatcgggatgctgcgggtcaccggggcatcatatccccctgtgggacagggtccggaaggccacgcctttccctccccgagctccacccagggaagagctacaccaaccggagcctgtccctttaaatgtccctgtaagag

SEQ ID NO: 50026 - DNA, 383 bp, Mus musculus
  source 1..383: mol_type = other DNA
catgactagctaatgtgttcattatttactgtccatcttcttcaacttaaagtgtcagttccacatgagccagaattctgactaatatagaaagaagtgttaacttttgtctatgataatcaggaatggtatataataaactgctacttgactttggaaatagttcaagattggcacaagtccacaggggtcctcggaaccctaggggtgggggcgagggtggcaagagctcctcctccgctccgcggggcgagccgaggctgcagagggactcccaccggtccagcagtcttggatccaccggtctcttacagggacatttaaagggacaggctccggttggtgtagctcttccctgggtggagctcggggagggaaaggcg

SEQ ID NO: 50027 - DNA, 330 bp, Mus musculus
  source 1..330: mol_type = other DNA
taaagatgccctcttcagataatatctgaaccagtagcagaaatttcgcccaccaaatatattttaaagatgatttgtgattttcttttgttctggtactaaaaaaaaaattcataagtctgttaccaagttgaaacatgatatttgggatacttttttttctctaatggagaactctacagtctcttattttaaagtgggccaggagtcttttctttacagcaaaggatatgtctttcatgtagaaagcgtttgtttcggaaaatggccatttttccctcttcgctgcggcgtgtgatagacacacagcccacagagtcgcgggccgat

SEQ ID NO: 50028 - DNA, 440 bp, Mus musculus
  source 1..440: mol_type = other DNA
cttttacttaataaaaatatacttatcttactatgtatctacaaacctacttatctccatccatccatccatccatccatccatccatccatccatctatacatagtctggagctgtccagcagctcctggcacgcgcctggaggctctccagcgccccgccctgggcagaaagcctctcagtctgggctggccaggcttccttcccgcccgggagggggtgccctgcgccggggctgccgtgcagcacgcgcccgatttcgagggggtgagtgcaaacgccgcccatcaacttggcacctggcattgagatcctaggatcccgagcggaggctgcgtctgcgggcagggctggctggaccaggcgctgcgtgtgcagggggaaaaagaggccgccccgcccgcgccccggctcgcgccccgccctcccggagcggtctc

SEQ ID NO: 50029 - DNA, 843 bp, Mus musculus
  source 1..843: mol_type = other DNA
atgtgcttatgtgtacatgtgtgcatgagtgtatgtgtgctcacgtatttgtgcaatgtatacattatcgtatatttgtatttatgtgtgcgtgtatgtatctatgtacacacactatttctgtacagacaactatctatatatgcatatatacagagacacagccatgtaccaatctgtctatatgggcacacatatttacatatatgcatatgtgtgcatctatatatacatacacatatatgtatgtatacgcacataagtgaagatatatgcacaaatacacataaatatatatgcatatacacatataaatttacatatgtacagacacacacagagatacacacacatatatatgcatatacacacagacacagacacacacacatgtatgtatgtgtacatgcatatgtgaatatatatacatccatacacaaatatatatgcatatacacacataaatttacatatacacagacacacagagatacacacacatgtgcgtatacccatacatatacacaagacacataaatatatatgcatatacacatataaatttacatatacacagacacacacagagatacacacacatatatatgcatatacatatatatatgtgtatatatatacacacacacacacacacacacacacagccgcaggcagggatgctgtgtcggtcccagctgctggcaggcgcaggttccccgcagggtgctgctgatgcggttccagcaggccatggccgggtggcgctctccctaggccgccgcagcgcccctgccctgctgtgccctgccgtgccctgccgtgccctgccccgccccgcccggt

SEQ ID NO: 50030 - DNA, 271 bp, Mus musculus
  source 1..271: mol_type = other DNA
aggagagcgtctcctggagttttctcagccttagcacgccaggggtgctgggctggactcctagcattgtagtagtgtcttgtctgacccggggcttggagggcaccccgcgaccactccccgcatgtgctccttcgggcgggggcacaggggctctccgtgcgcacgtgtcatagaagccggcctgcctctgcggctgcagcgctccccgcaggcgcggcgcggctcgcccggcttctgccctcccaggctcctcgcagccggggcggtt

SEQ ID NO: 50031 - DNA, 383 bp, Mus musculus
  source 1..383: mol_type = other DNA
tatcctaaataaatctgtctaaattagggaaggagagtaagtgttaattggaatcacagttttaacactccatcgatagtttccaaaatgggaagtttttaaagccttgtagttaaagtaggcatgcacacttgtaggtgcctgtggatgccacttgtaagcgaactcaggtcctctattaagagtcagccaagcgctgagatcttataaattgccaaatagccaagaaaaacacatttcctttcttcttgttatcactggtactaatatcaacagcgaccaagtacatgtaccctggagctcatgataggcttggcaggcagagtggcagcgcccctttgacatgaatggatgggccggacacaccttccatcccagtcctg

SEQ ID NO: 50032 - DNA, 169 bp, Mus musculus
  source 1..169: mol_type = other DNA
atgccaacattcaaaacacaagaacgttatgggcttttctccagaaccggccacgttgtcagacctgggtcccaggcctgactctgcgacaagcgtctgaccttgtgctgcacaccaggacggcccagcccggcgaagccttccctcatccaggaatgcggttcccggg

SEQ ID NO: 50033 - DNA, 329 bp, Mus musculus
  source 1..329: mol_type = other DNA
agggctaccgggtgacaccctgtcccagcgacttcgtttctttaacaattaaaggcaggaaattatcaattagcaatgtgtggggttggtttgcatccctactctagcaaaccaattataaagacatttatgatgcaagcagattttcatcattaacacatacagatgtagtgtaaattaaaattaaaaaattaaaatcaccatggtattgactctccctgttgacaatatgttcttgtgcacagagtaaagcagacctggcattgtcatgcttattctaagaattattccctgattggtcaataaaaggttgatcagccaatgactga

SEQ ID NO: 50034 - DNA, 483 bp, Mus musculus
  source 1..483: mol_type = other DNA
aaaatgaccattagtgccccctgagagagtcccttggaccctgagatctgagcaggagctaaggaaactgttaaattacattttatttagtatgcagaaactgtttacaagtttcataataggatttaaaatgtaactcacatggattttaagagaaagcgcatttttttcttttaattacaaaagttgtatgtgtgtggttgttttgcttgcatgtatgtccatgtaccacacacaagcctcctgcctgaggtccaaagggttgagtggccagtaatgcttatgctttttttcttccacctttgggattaaaaaaaaaaaagcataaaaatatagtattttttaaaagaaaaatctagcatgctcatctggttttgaaaagatctgaaaagtagatttcactgataaagtcggagaatacacggtattattccgccagcccccagcctgacaccgcacgcgttggggaggaggcgcttgccc

SEQ ID NO: 50035 - DNA, 713 bp, Mus musculus
  source 1..713: mol_type = other DNA
ggcgagcggactcgtccgcggccgccggggctgcgccgagcgagcctgcttctcagtgtggccggaggcccggcgggcgccgccggggacgcgaacatcgcctccaccccccggaacaaccggtagtggccgttccccgcgaggagccgccgcgaccgtgtggagccaggcgcagtgccgcggccggccctcggggggcgctgtgcggcgctggcggcccggccgtggcggcggcagcagagaacgggaggctggcgggcaggcaggcaggccggcgggcggcgcgcagcggctcggctgccgccggagcctgtgcccggggacgcccgggccgccgccgccgccgccgcgcgtgaatgtgtgcgagggccccgcggagccgcggcccggatccacgctgtcaccacgcggccccgcctgccccggccccgccgcgccgccgccgccgccgccgccgccgcaactcccaggcctgcggccgcccgggcccctcgcctcggctcgcccggcccccggtcggctcgtgcgccccccggccgcagcaccatgttgaatcgcgtccccgggccgagccgccagggccggcggcgctgagaggcggcccagagccgggccgcgggaggcggcgaggcagggtgggggccgcgctcgccccgcggctccgcgcccggccgcccgtcgcctgccccctccctgcgccgccgccgccgccg

SEQ ID NO: 50036 - DNA, 432 bp, Mus musculus
  source 1..432: mol_type = other DNA
acttcggtgtgacgtgacgaagcacttaaagccagccaggctcggctagcctcggggacgcgggcttagggcgtgggagtgtgtcccgggctggcaggccgccgcgcacgtgcagcgggcggagtacttcatccgtgccaactacgcacggccactgagcacggcgcgtgcgcgtagcgctccgagcggcaagaggccagaagccccggccactcgcagacgccggagctcccgctctccagccgggcggcgtgccccgcccaccacgtccgtccgtccgtcgcggctcgcgggcgccccctggaggtccgggggagtacggcagcgcccgcgagcaggtagcgtgcggcgggtccagccgcccgcccgcccgcccgcccgcgtcgtcaccacagtgcgccgacctgtggcggcgcggctgagccccgcgga

SEQ ID NO: 50037 - DNA, 169 bp, Mus musculus
  source 1..169: mol_type = other DNA
gagactcacttcctgcctcaggggacaggttgaggcctcactgtcttttggaaatctactaatttacagattccatgggtgattctgtagtagtttagaggctgtgagtggtgacatcatggggccctagcctcaggttacaacgtgtaggctgggaggcccttccagt

SEQ ID NO: 50038 - DNA, 460 bp, Mus musculus
  source 1..460: mol_type = other DNA
ctttccaggcccagcaagggtagagtcacgtggccgggtgtcacactctgagtcccaaggggtccccagagctgctctgcgtagtccaccaccgcccctgggtcgcggggctaccctactccgttcggtgaggccctggcgtaccccaagagacggccccctgccaccgcctgggcgagtgagccgctccacctccaaccccgagggtgcgggtgcggcagctgtggccccagctgaggccccgggagggcgcaggcaggtgccgggaggcccgcagcctccgtatgctcgggtaccaccagcgcgttgttcgcgcatccgctcgcactgcggtgtccgccagccgcggtcgccttgcggtctggtagcccaggggggacagctcaactccgccggcgcgcgggcatggagggatgatggtctgaaaggccgcgctcccgtcccgacgcgcctcgcgcgg

SEQ ID NO: 50039 - DNA, 406 bp, Mus musculus
  source 1..406: mol_type = other DNA
agcctcttgaaaggctccaggtagagtcatttttgaatcatgattcaaccgcccatgttgatggctaactttatgtttaaaaatctctgtgcttaaagcaaatttcactaggggttaatctttattattattattattatggtcttctgtaaacaagcttgcaagagaacagattgaagctttgtattctggtcaggctgatgaatctccggccggacatgagggactcaggcttccacgcggcagactcctttccaggcccagcaagggtagagtcacgtggccgggtgtcacactctgagtcccaaggggtccccagagctgctctgcgtagtccaccaccgcccctgggtcgcggggctaccctactccgttcggtgaggccctggcgtaccccaagagacgg

SEQ ID NO: 50040 - DNA, 675 bp, Mus musculus
  source 1..675: mol_type = other DNA
tcgggaagctgctccacaccgcgccacgccgtcgcccgcgcctccgccggaggatcgtgatgctcttttttttcatttttctttaataattaaagaggaaaaaaaaatccacttggattacggggaaattttaaaaattttttattaaaaaaaataaaagaaaaggactccgtcactgttacattttttcccgctgccgtgaggtgggccagctcgcagaggggcggcggcggggacgcgggcggcgccggcggcgggagcgggggcttgcggccacccggccacagcctcccgttagggggaagggggcgtggggcaaggcgaaccgcgcgagggcttgacaatcaatcagaggaggggcgggtgaccgggtacccggggcagtccccggcttgccggaggctaggctcggcgtgcgccctgtaaacaagccccggctggggcagggggaccgggctcagcgccggggcggctggaggggcgcctcggcgggcgcatctttgtcgcggccccgcgcctggtacttttccactcgcctggcgggggatgaatcagccgcgctgcgccgctcggcggcgtcacgtggtacggggggggggcgggcgggcgcgcgccgcagtcctgacgcgccgccttctaccttcgcaggcagcctcgagggccagtgcgccggaa

SEQ ID NO: 50041 - DNA, 395 bp, Mus musculus
  source 1..395: mol_type = other DNA
gaaagggaagggccctcgccattccctaggggtccccctgagccgcccgcgcctacattccaacgagggcgctctcgcgagggaacagggcgcccctgggcggcctcggaagaacccagcccgaggttcttttattaaaggtgtgtctggcttgcgcaactgcgagccgcctctcatgcagcgtggcagcgcccgcccaagtgcacactcgccggctgcgtccccgaaacgcagcgttggagacctacagcagccgcgggtggcggccacccacggggctgcagtgccccgagccgcggggaagcggggtgcggctggccccccgattcggggtgcggggcaaccgggaggcccgcgccccgcccactgacgcggcgccccgccgctataactcg

SEQ ID NO: 50042 - DNA, 382 bp, Mus musculus
  source 1..382: mol_type = other DNA
ctggcctcgggatgctgccatcccctgaatggcagtgcattgccatacacatcccatattatttgttgaatgaacaaagaaaagaaattattctcgttcttcaaataagccagtcagtgtgtgagtttataagttacagtcactgcatctggctagggagttcgagcccaaggccgttggcgaagttggcttgacagcttcaccgtttatctgtgaaactggagaacacactggttcccacatcacgggccctgtgggaagcagacaatttcacatttgcaaaacactcggagtcctacacggggctttgtaatattatggctgtgacttcctcacgctgagccattgagagtcttggctcaattttataataccgggcaca

SEQ ID NO: 50043 - DNA, 374 bp, Mus musculus
  source 1..374: mol_type = other DNA
agagagatctatcactgatggaacgttagtactgttctaatacattcctgaagacagacagttagacaaaaaagaatggcaacttttattaaataaacacggaccttctttgcttagtgtcagaaaatggttttatcagaaaatggttccatatacatatttttccttaacgagcagaaaatgtagtttattatagcttcctttgtactcagaatcatatttgtccgtgaaaaagttgtttgtcgaatactctacactgactacttttacctacttaacgatgtagatatatcctggtggaggggcctccattgctctctgggctccaggcttccctctaaaaggacagctggacagctagactccacctggat

SEQ ID NO: 50044 - DNA, 633 bp, Mus musculus
  source 1..633: mol_type = other DNA
tttaagcctttaaacaagaatggatttgtaatggagccctggtggctgtagggcctctaggggacaagtccttctggaagccgccagcgcgaagctgggcccggtgcctcgggccgccgtctccgagttctttcccagggaaccggggggcgtccccgcggcgcctccgcaccccctccccccgcaaagccccggtggtgcccgagggaacgcgccgcggccctcgctcctgtcctgggcggggaccccagcaagcacccggtgcacagcgcccgccaggcccctcgccccagcccctaaagccaggctccgagatcggggtggggtgccacctgcgggccaccgcccgcgggctccggcgcgcggcaccccggcaccctgggcggctccctaccgggctgggcggctcccccgcgggcgcggggcgaggggcgcggggcctgggggtgcagagtcgcaggcctcgctgcggtcccacccggccgagaggcggcgcggagcccgcacggggccgcctctgcgattggctgcgccccccctcccctgctccgcccgccgcggcgcccgaggagcgaggacgcggggacccgcctcccgcccgctcccgaccccgggcgcacgggataaaaggcg

SEQ ID NO: 50045 - DNA, 362 bp, Mus musculus
  source 1..362: mol_type = other DNA
gcacaagcaagcatagtgcttgggtatcctcaagagctttggagacactgagcccaagaactaaattctccacctcagaggccatgagcctttccggttactccgctctgagcagagccgggcattgagagtcagcttccagttgcttcacaggcaaggtgggccttcctgctgtgtacagtccttgtttcttttaaaaaagcaaggacacccttgaactgttcttgtcaagatgttcttgacaagggctgggcacgtttctgagttcgaggccaacctggcctacagagtgagttccaggacagccagggctacacagagaaacgtggtttcttagaaaccttgaaatggagccaggatgc

SEQ ID NO: 50046 - DNA, 360 bp, Mus musculus
  source 1..360: mol_type = other DNA
accatggagtttctgatctttacttttaaatgaacttaaaagacaacccagctgcacagctgtaagattaattatgtcaaacctctgggataagattcataaatcagcgtgtgtgggatacacacctgcacggctgcctcccttgtgtgattcgaaggttcagtcaaacttgtgaatgaataactgatctttgagatgatatgttttccattcagtttgaaaaaagttggtttgcattgtacaaattcttttagataagccagggtctatctaaagatagacacagttcttagaagttacagtaactttctcctaggccgagcgcgggagccgaaccttctgcgcacgctcgagcggcgc

SEQ ID NO: 50047 - DNA, 345 bp, Mus musculus
  source 1..345: mol_type = other DNA
agttttaaagatttatatgtatgaatgttacattcacatgtatgtctgtgtgccacgtatgtgccttgggaatcaaaccttggtcctcagcacacagcctttaatcccagcattcggattgttccggaccaggtaggcaggatgctgctccaatccaccggactccacagactcatcctgagaagctggagccagtgtccctggcttcggtgtcagagatctctgccaggcgtgggaactgctattggcagtctggcacagcaggaccttaatgaagcctatggtccactgagttagcttaggcacgcaccggggctcatgcaaagccagtgctgactctctcca

SEQ ID NO: 50048 - DNA, 490 bp, Mus musculus
  source 1..490: mol_type = other DNA
cacagctgctttagctacatagtgagtttaaagtcagccaggtctacctgagggcctgtctcacgaaacatttaatagacccaggcctaagccagaagaatgagtctggatctgtccagggtgtaacccaagtaacactgtgcaggcctgaactaggtgctgtatgtttgcatatgaggctgtgtgtgacccacagctaagctgggtccggccagcagggcaaaggctctgcctggcaattgcacagtgtggtgctaaccgtttgaaaccggggaccgtggtttcaggatccggagtaagcagccaccatcatctggtggcttcctgcacacgctgcagctggcacgcagctggtatggctagctgtaaccccaggcatcttaaggctgccattaactagaagaatgcatcctactattagcagtgatttcgaacagattttaaaccgtgcttcccagggagaggtgggtccccactcaccctcttaata

SEQ ID NO: 50049 - DNA, 277 bp, Mus musculus
  source 1..277: mol_type = other DNA
ctgagaggaacctaaggtaggaacttaagtagaagccatggaggaacgctgctcactggcttgctcaagaccacgtggccaaggttggcaccgcccacagtgggcaccatggaaacgcctcacgggtttgcctatgggggcatcttcttcgcagatgaccctaacttgtgccaagttgctttcttaggctataaagtcctaggggtatggactacagtctccagcaggccaggtctgggtacaaatagcaagcattacctgttttaaacatctggca

SEQ ID NO: 50050 - DNA, 443 bp, Mus musculus
  source 1..443: mol_type = other DNA
ctcccgcttcctggcttaatggcagtgggaaagaggtcacagtctgtcctctgccttcaccacctagccgggcataggggagcatttggggggcggggcatggccccaaagcccaggctgtctttacccgcgccagtgttttgggaaggctgcccagttccagccccgggctgctggaaaccctggccggacgccccaggccaggaagcggccccagcccggatttccctcccgggtggggccgccatggccacgtggcggcgggtgcagccatcaccgcccctaacccggcacccgggcagctgcaggggcagatgaacccactgctcgggtagggactccatcagctgttcctgctccccgccccctcggcctgtccggggaggggaaggggcgggcagcgcagggggtgtgacagctcccgcccggaccagtgccagctg

SEQ ID NO: 50051 - DNA, 108 bp, Mus musculus
  source 1..108: mol_type = other DNA
gagggtggtaagagaactcatatctactgcccctcccagaaagaagcctgaggcttagtaggtctcttgtgcccagggaagatatcttcagggcactgtgagctcggg

SEQ ID NO: 50052 - DNA, 434 bp, Mus musculus
  source 1..434: mol_type = other DNA
gtgctgggattaatggtgagcaccaccaccacaaaaagaatgaatatgttaattgttgttatattattttagattttttttcagcaagttggggaatcaaactagctccccagattaatgagtttgaacttcccattcaaaatttaatccgtctcaaaaaaaaattcaaaagtattttaaaaattaaaaagtgcttggtgtgtgtctgaagacagctacagtgtgctcacatatacaaaatatttttaaatgatcattgtagccggctccggtaaagacggtatttctaggccagccaaggctaggtggcgttctggggatgaggccaggaccctgcccttccaccaggggtcgccggcctttgccaagcggcggtgtcgggagcggcctccggccggggagggcgctgtgccgttggcaccgggggcgggctg

SEQ ID NO: 50053 - DNA, 493 bp, Mus musculus
  source 1..493: mol_type = other DNA
gctgcattccgatgtgatccgctgtaatgcactgagagaaaaattttttttaagtttcgaattttcttttaataggaacagactggacccttctgctcccctcagcagacagtgggggcggggggtgtctgggattccttgctcgagactccaagcgtgccctgctctccctgtgtgtagcgctgccctccaagcaccctggcttgtgtaaacatggatgcacgcccgtgtacgctgtgtatgcacgggtgcgtgcactcaggtaattgtgcgcggggcgcagcgccgcgcggcggctggggcttccgcggccgcgcgcgggtccggccgcgtcccgcgttccgggttcggcgctgcctcccgggcggtgagccgcgccccgccgcgatcggtgtctgccgccaggctgcccgggtggtgtgtcccagggccgccagcgccggccccctccccctacccggccggccaggctgccagggccctccccctcccg

SEQ ID NO: 50054 - DNA, 410 bp, Mus musculus
  source 1..410: mol_type = other DNA
ccgaggaagctgcctttcagtggcgggcacctcaagggcactcagtgggaaggtcctcggcccctgacccttgaatctgacctcctcccgtctaagatgggggagaggcaggcctcagctgagtttattagctgagggagggctggagctgcattccgatgtgatccgctgtaatgcactgagagaaaaattttttttaagtttcgaattttcttttaataggaacagactggacccttctgctcccctcagcagacagtgggggcggggggtgtctgggattccttgctcgagactccaagcgtgccctgctctccctgtgtgtagcgctgccctccaagcaccctggcttgtgtaaacatggatgcacgcccgtgtacgctgtgtatgcacgggtgcgtgcactcagg

SEQ ID NO: 50055 - DNA, 309 bp, Mus musculus
  source 1..309: mol_type = other DNA
tcaggaggcagaggcaggctgctgacctctgtgagtttagctttgtcacaggggtgggatgggacccagccccacctattaaaaactgtcactgttccctgaagaaaggtaccatgactgtcagtaactgaaaccaggcttggcagaggcaggagctgaaactcacaagctctgcccttgtaacccggcctggaaactgggcacacccggtgccaggccatgcccagtccagaatcagagcaggggcaggctctgcagaggctgggcgggataaggccagaccctgtcattgagaacgggttgcctatc

SEQ ID NO: 50056 - DNA, 312 bp, Mus musculus
  source 1..312: mol_type = other DNA
tgggggtatctgtattctagaacacccttatgtttatttatgcatacaagagtaatctttatccaaatttttctacaattttccttcacaccagggtctcggtggcaagcgccctgcaggagaaactcacctgaggttccccatccggcgcgcgcagagaacggctccctgcagcgcgccgcgggcgtcggggtcccgggtcagacgcctgtgctgcactgtggctggcggtcctggagcccctcacaaggcagggcctccaaggcgacgcctcggggccaggtgctgagcagtctctgcttgtcaaaaagc

SEQ ID NO: 50057 - DNA, 422 bp, Mus musculus
  source 1..422: mol_type = other DNA
ctgcaaccaaacaatatgtttttagctttttatttaatatcatcagatttatttaagtaagagaagatcattaaagatctgatggagtgtctgaagacggctacagggtcgtcatttaaataaaataaatcttctcttctcaaactcacgttctaggctaatttgaagatgctggaagccccgtgcaccatcacacagggaaataggatcaccttgcaaaactatggaagttagatcctctgccgggacctagtacaggttctgggagcgctctgatccggaagctcagatctgggggtatagaggaccgagcacctccgcgggccccctaccggtgggtaggtgcgctgccgctgcgcggcaggagggacgcgctggagctcagggcgcaggcgcaggcgctcgcgctcgcccgggtcctc

SEQ ID NO: 50058 - DNA, 462 bp, Mus musculus
  source 1..462: mol_type = other DNA
aatactattctgaagcctctttccaaatagggcctgcgccagaggcgtaattaaattaagaagctcggtaagtaatttgaatgaacaagttaatttttcctccattctacctcaactagagatcactgtttaaaattattccagttataagagtctaagctaatcaagcgtgtcaagcgtgacaagatgcacaaaatcaatttagaactcaaaacagggagatggagacgcgagtcaaacgctccctccacgtctcgggcctcgccacctcgcgcaggcgtcccgcgagcctgaaggttccggttcccggaggttcccgggctttgcggtccgcgcccggccggaaacccctttgcctagcagccggtgggccgggaggctgtgtcaggctgggcccgcgggcctcggcggggccgagcggaaaggaggacggcggtggggaccgtgccctgtcttccgccc

SEQ ID NO: 50059 - DNA, 431 bp, Mus musculus
  source 1..431: mol_type = other DNA
gtccagctggagccacctccagactctctggccagagcctcagagtggccaacagtccctggccagcggttgctctatccaggctaagggcacccactcccctggagattcctgaacctgggccaggaagagccgccttttctagctagttccccgagactccaggtgggagctcacgggcaggcaggtctggaaaactgtcccccagatttaggatcgaggaaaggggcccgatgctcccccccttcccgcctgtggttagagggggcagtgtggcagtcccaagtgggggcgaccggaggctgtctcggtgccccgcccgatcaggccactgggcacattgggggcggtgggctctggtccggcctgggcgggctccgggggcggggtctcaggttacagccccgcggggggctagggggcggcccgcg

SEQ ID NO: 50060 - DNA, 294 bp, Mus musculus
  source 1..294: mol_type = other DNA
tttatcagatacatgattgacgttggtggtgctcagggaacaccagcccagcaaaagtatcttctgggaggtagcttttccctcccagactcttgcacctctttcctctctgagaaatgatgcaaacgtggaaagacttttgattattgtataagatataccagtgttctgtgtttcttaaaggcaggtatctgtcttaagacaacacacgtttgaattcattagcaatagctcgcgcagagggaggcggagcctccttgccattttcggcctgtagaggtttggaagcctctc

SEQ ID NO: 50061 - DNA, 320 bp, Mus musculus
  source 1..320: mol_type = other DNA
tatgtatgtatgcatgtatgtatgtatgtacgaatgcatgtatgtatgacacattttaaaagtaacaggttttaacctggcattttatggacatgtatgtatatgtatgtatgtatcctatgaacaggatataacaccagtgtgcgcgtgcatgtgtgtgcgtgcatgtgcgtgcgtgcgtgtagccatgcctgagatttgtctggcagtttctgctcctgtcaccgagcctggttcatgcctccccatttcataaaaagggagcaaagccaggacttacgcactaagacttccaaaggtctgtggctgcacagcccagc

SEQ ID NO: 50062 - DNA, 180 bp, Mus musculus
  source 1..180: mol_type = other DNA
gccacattcccaagcctgggcctaaaggcctagaattctgttttttttcaccaaagaagaataggcttaaaattcgggattttcctcccgtctgcgcaggcgcactcggctcgctcacactggcctgcgcgcaggcgcccacgcactcggccggcttgcgcaaccccggggctgatgcga

SEQ ID NO: 50063 - DNA, 378 bp, Mus musculus
  source 1..378: mol_type = other DNA
caattaagggctgaaaggaaattgtattcaggtcttctgaagtccactagtctcggacgctatttaaagcgctggggattattctcggaatttaagtacttagcttcataatttctgggttgctgcagaagggagaagcagatcggtcgcgcctccctccgccttcatcgctacccagtcctgtgggccgctggaggatggacctggctctcccatggtcctccgaatgcggagagcgggtgaaaagccccccccccccccccaggcagacggtctctctccggcttgggggtgggctctgaggctactgacacgtcatttacgtgccgtgcgtcgccttggaaacgggggagcatccgcggcgccgccgggagaccc

SEQ ID NO: 50064 - DNA, 459 bp, Mus musculus
  source 1..459: mol_type = other DNA
tgctgcagaagggagaagcagatcggtcgcgcctccctccgccttcatcgctacccagtcctgtgggccgctggaggatggacctggctctcccatggtcctccgaatgcggagagcgggtgaaaagccccccccccccccccaggcagacggtctctctccggcttgggggtgggctctgaggctactgacacgtcatttacgtgccgtgcgtcgccttggaaacgggggagcatccgcggcgccgccgggagacccgcccctgcctctccagccgcactcgcgggcactgctggtggatggctggggggagtcccgagactgacgcgctgcgggtccccgtctcgaccccgagccgagcgggcaagcctcctggtcccgggaccctagacaggtcttcgataggctccccgcccctctagggagcctaggtgtccctgggctccaccccgtccctcc

SEQ ID NO: 50065 - DNA, 332 bp, Mus musculus
  source 1..332: mol_type = other DNA
ctcagcgttaagggcactgactgctctaggtacttacagctacagtgtacttacatataataaataaataactcttaaaaaaaataaaagattgtaagattcagaggaccagtgactcttctgtaagactgtgtcttcgccaaggggagaggtggctctccccaggagagagcacaccaattggtgtgaatctgaaggtacaacgatcatatttgctatatatactagaacacaaatttctcagaaaacctgcaagttctctaggccactgccggccttaatactgctggctgccactggaagctcccatctgcctgagcacgtgctcaggc

SEQ ID NO: 50066 - DNA, 183 bp, Mus musculus
  source 1..183: mol_type = other DNA
cctcaacctccattggggagccactacattatggtgctggcacagtgtgggtgccaagctgtctggtgggtgacactgtcctgctggtcacaggacaatgatgtgacaaaatgattggtgacagcataaaagatggcaaattcaagttcaatttcctagctcccatctgcctgaggaagagag

SEQ ID NO: 50067 - DNA, 401 bp, Mus musculus
  source 1..401: mol_type = other DNA
tacaggcgtgaaaaatacctcgtgttgttacatcaaggtgttgtccgacgggagctgagtggggctttccccatctggaaaagagctttcccatctactggccacttgaggcttattcagactaaaatttgctgagaacgttttgtttttgttttttgttttacagcacaaatatgtccagaaacaaaaacaagaagatagaataaaagtgttctctcgttttccttggggaaattttcaccagggtatacccctcccaaatattcacacaaagccatggttatgacgattacactggcaattattacatacttgcaggtgtgaagagctaggtttccaccaggacgcaagcccagggcctggggtggggggctttgtgacataggcgccccagaactcca

SEQ ID NO: 50068 - DNA, 463 bp, Mus musculus
  source 1..463: mol_type = other DNA
ctttcatatatatatatatctttctcctagttcggagtagatttttaaaagaaatacgtatcacatagtttatggcagacagcctttgtttgcagaatgactgtgataaaacaaacgttaacgtttacaagctaaatcaatgtcgcaagtcacatttgtaatatgtaaaactaacacacttaacctaatgtagcttcgatattacgtttttaaatatcaagtcgtctaaatgtgcagtgcacacttgtagctagtcctaggggagggttccaaccctcttgaactcccacccccgcccccaccctaccgccaggcgccgtgggaggtcgcaggcggtgggcggggccccgggagcagcaaagcccgtgggctgtggcgacaggagtgtgggtccagcggtcctctccacccgtgcccgcccccgcccgcaccacggagccccggaagcggcgggatttcctgt

SEQ ID NO: 50069 - DNA, 569 bp, Mus musculus
  source 1..569: mol_type = other DNA
tgcaaataaaattcaaaataaatgaatcattttttaaaataattttaaagagatgcaaggcatgggtaagctttgacctgagctgtcaggtgtaccatctcacgtgacaagagagacacccaggcagactaggggctctgggatggtgttcttctgcatgccatcttgctgaacccatgccaaagttcccactttgctgggaaggctgcaccttaggctgctcctcccgagagcctggacagaaaagcagcagcaagaccttggtcctggtgctgcttagacttttaggaaccttagctttaatattcgttatcgccaatcgatttttttccaagtcagaaacgtttgaaattcagaacaaaaacatttatctttacagaaaccttgaagtcaggtttgaacagaagataaattctgcttttttctctgaagatcaacagatgttttataaaactatatagagagactaaacataaaaatgtcatattgtctcttcatttcaccgacatgggctgggagagagctaatccccgccccacacacacctatgacgtcatagctgaagtcat

SEQ ID NO: 50070 - DNA, 300 bp, Mus musculus
  source 1..300: mol_type = other DNA
aacaatgttgctatgaacaatgttgctatgaacaatgttgctattaacaatgttgctatggaatggattgacacaatgtcttagtgacaccaaaatagaccaggctggcctcgaactcagaagaacagctagatatttttacacaaaacttttcacttgggatccaagtagtagttgagtaggttggacagacaaatatcacctttgatcctaggatgtgatacaggctgtagccaactgcctttgttccaaaagtaggttaaggaaatcctgcttcctggacaggaggccagaggcctt

SEQ ID NO: 50071 - DNA, 183 bp, Mus musculus
  source 1..183: mol_type = other DNA
gtattacatataacttttgtcagcgaagagtgctgaaaacttgtccatacttcgatccttcttagaagggacaagagcttgctgacaggaacctgatatagctctctcctgagaggctctgccagtgcctgccattggacggagcacagggactccagctgcagagaggcccttggtcctgtg

SEQ ID NO: 50072 - DNA, 447 bp, Mus musculus
  source 1..447: mol_type = other DNA
gaagtctgacgaaagaaaagtgttcaatagttggctttggtttcatgcctaataaaggaaaactgatttagaaactcaaattttaattatatgttaagttctactctacttaagagtttagaaatagcaaattattccctgttccaaaatctctttgagtcaggctgaccaaactcaggctttgtcttcaacagtgcgtggtaaacacatgcacacactatatgttgggaacagagacagaatttctctcaaagttaatcttacaagttttaattacttaactttatattaacctcagaataaaaacagccctgtttttggagtgttgaattaaaggcatgcactagcatgcccagccatctactcattttaaatgtataaataataagatatatctctctttgtcctgctttttttttttttaagatttacttattataatattta

SEQ ID NO: 50073 - DNA, 356 bp, Mus musculus
  source 1..356: mol_type = other DNA
cgaggccagccagggctgcacagagaaacctcttaaagaatcgtgaaaacggaatagcctgtttctataatacactcactttatctgtaaataatgtctacctaaaaaataatgtctatcttagggctgctctacaaaaattaattagtacatatatatgattcatgagatagaaagatggttggtcaccatagaaaactaataaaaccttttcatgtgtaaacagaaaacacggtcagccaccgtccactttttttcatatgagtacactgtccctgtcttctgacactgcagaagagggcacgactggcggtggcccgcctttccgacgctcaccggccgagtgacagacactt

SEQ ID NO: 50074 - DNA, 260 bp, Mus musculus
  source 1..260: mol_type = other DNA
aaacactagagacctaaactctgcactttaataaatgctacataagaaaatatatatatatatggacaactttaaaactattagttttgccacaagactgtattttcataagaaaaactaaattttgaaacctaatgaattaatattctgaaaactacttacgagaatctgacaggttagcagaatttcccgaaaccctttttaggaggcacggcagcccggccggtggcaccggtgagcgagcgggaaattgactccgc

SEQ ID NO: 50075 - DNA, 348 bp, Mus musculus
  source 1..348: mol_type = other DNA
gagagatggctcagcgtcacaaccatctgtaatgggatccgatgcccaattctgttgtctaaagaccactacagagtactcatatacataaatgaagataaataaatctttaattccttcgtttcagaacccaggaaccttttagtggctttcgcgtttctgcacggggcagggccactcactgcccggtgttacaaagggggttaactagaggcccgccggtgaggcccccttacccacctggcggtcacacgaccggatcctgcgtcccggccgccggtccgttcttagccgcggactgggcacaacctgtgtgtcgccgctccggtgacgctgggaagtgctcgc

SEQ ID NO: 50076 - DNA, 344 bp, Mus musculus
  source 1..344: mol_type = other DNA
cgtacacagcagctcactacagctgtgcttacctgcaccagtcaggccagtaggggaaagtgaccactggccagttgcccatgaccccacacccatgtgcagctagggcactaaaagttccagtttttttaaaaggtggccatcagtgttagctcacctgtaaattaattagtttcaagatagctaaggctacatagagaaactctgtcttgaaagaaaaagtaatgatccttgatacctcaagcttcctggaattatttagctcgcagttgcagctccatggagaacccacatcctggacaaaggaactgccagttacggtaacgctccaagcctttaccatg

SEQ ID NO: 50077 - DNA, 116 bp, Mus musculus
  source 1..116: mol_type = other DNA
tcttcagcatgaactttctgaagacttttaatcgtgggcagagccaagccttgactttcagaccctggtctcaggtgagccagatgcaaggatgtgcttccagggggctgggaaca

SEQ ID NO: 50078 - DNA, 344 bp, Mus musculus
  source 1..344: mol_type = other DNA
tgcccgggctcgccctgagaccaggtctagggctctggaggggacaagagtgtctctaaagaaccccacatgcagcagggtctagatccaggctgcatcctccccggcagcgcctcctgctggcaggagtcagcatgtgcggccgatgcagccacctggagggtgggtgcggacacccaggtagggaaagcggcagcctcacctcgctctgggctgtctcctaaaggattctgcagaagcctggtcgggacctacccggctgaggtgggactcagggggagccaaacccaacctctcccgcctgcgatggcagagctccacagaccctgtcttttctggagatc

SEQ ID NO: 50079 - DNA, 326 bp, Mus musculus
  source 1..326: mol_type = other DNA
caagcacggctggtgtctgcctcacatcctcttgggatgcccaagcaggaatgatgacagcttttagaagatctcttcagagattggtgctggatgattagaaccagcatcctgcacaccgaaaggcggatgctttggcaatgtctggcacaatccttggcagggaagagagaatctccatcccggcttgtgtggggaggcctagccaccgtcagggtcggccctttaccgcagcccggaacggagagggccgggcacctgttgcagatccaggacttgcagagagctgacattgcaccgggctcgcgtctgggcgagaggccggg

SEQ ID NO: 50080 - DNA, 320 bp, Mus musculus
  source 1..320: mol_type = other DNA
ctcctgtgactggagtagttctactgtgaaaactgtactacctctactccagtgaactatctctctcacaatttttataaaaaacacttttcaaaaaaaaagggggtaagagcacccgactgccagtgtacttacatataatgaataaataaatctttaaaaaaaaaaaaaaaagcaaattatttgttaccgtataaactttctcgctgaaagctgccagctttgactgaaatctagaagggaaaattcttgaccttacggcctggccggccctcgcgccgtgcattcgcgtggtgcaggcccaggaactccctttcccg

SEQ ID NO: 50081 - DNA, 240 bp, Mus musculus
  source 1..240: mol_type = other DNA
cctcacgggacttcctgcccatagctctgtatccctgaggcccagccctggcatccaggctggactctcactaggtgacactatcagtgcgtcagattgcttgccaggcctggcatgagctggctcctggctggcagaaagcagtttgtggtgacactaactcatagacactcagagatcactaggcgctgactcggagtctcctactattggctgcatcagtctgagacttatagcgga

SEQ ID NO: 50082 - DNA, 370 bp, Mus musculus
  source 1..370: mol_type = other DNA
ctggaagtgatgactccggatttctatctatacagtgagtttctggccatccagggctacactgaaacactgtcttaattttttagtaaccatgtgtctaccccatgtccacagaggtcagatgggagtcactaaggagacaatttacaaaatatttttaaatattttatgtgtatgtgtcctgaaactggggttccaggtgcttgtgatctcagacctctgcaggcaccaggcatgcgcacggaaagtaaaatggaaaaactatttgaagacatttattatttttttaagagagactagggttcttgatttaaaaaaaaaaaaaagcggtcctccggcatgcagggggcgctgaagtaatgctgcctcc

SEQ ID NO: 50083 - DNA, 336 bp, Mus musculus
  source 1..336: mol_type = other DNA
tgtgtgtgtagtctgagctgctggccagacacacaggtggaattgtgtttacaaccggtaccaggagctgggtaccacagcttaggttgtcagtgctgcctaaaattacttgaacacaagactggtgtccgtgctgctgttgtacaggaggctggagaagccgccagctctttctgcacctgcctctgggctgcttgttgccatgttaaccttgggcaagtgccctagctatgaaatggggacagtgtgtgcctccctttcctggccattggtaatggcaaatatgtgctaaggttaggaattctgcagtctcttcccctctaggaggtggggacg

SEQ ID NO: 50084 - DNA, 372 bp, Mus musculus
  source 1..372: mol_type = other DNA
attctgttcccagaagagttataacgctgcaccaagctcttatacttgatgcatttaaagaatcagattctaacatagcttgtggctagagtctcaggcagtgtctccatccagactcatctagagagacttcatgagagccgccttcctcttcctttatgggaaaggatctcagagaagagactccctggtccgagccctgtggccagcgcagccaggatgtggcaaggtcccggagctcgctctgctcgggagcctcaccctaggctcagcttcagcaccggctgcttttgctgcagccgctgccatggtgatgggtctcgcgagaactgccgctcgctaccgcgcacttctcgcgcgatcgtggaggtg

SEQ ID NO: 50085 - DNA, 450 bp, Mus musculus
  source 1..450: mol_type = other DNA
aggcgggagtgcggtggcgcctaaccccttcactgccgctgcctgggctcacccaggccaggtcttgtgcagcaaacgcgcgagcgtggagcatgcatttgggttatctcaagcattcatccaggaattccggagaggagacccctgagatctcggatgcctttgaccaaggccaaattctgaggccaaacctgagccctcccaaggggcaggcgtaaggctctgaggtgggcgggagccaagccacacagtggctcctcacttgcaggctcagagtgccctggtgcgcacaggctcgtgggctcttcaagagaccgtcagtaaaccctgtcattgggaccagatcctggtcccttggggtcaccgcactctccctacagcctcgggagaccccggagcaggtgagtggcccccccgggctctgggaggggccgcagttccgtcagctcg

SEQ ID NO: 50086 - DNA, 346 bp, Mus musculus
  source 1..346: mol_type = other DNA
aggttgactcaaggtgccatagggtgacactaggtacccagagtgactgtaacaaaatgattatttggaagtttgaggcaaactgctgggcgcttctgagtttcaagtgtctccacggagtcgctggctagggacagccccaccggcgcgtgtgggggaggcaatccaggctgcaaacaggttgtcccccgccccctggcggatgctggtccccgacgggctccggacgcgcagaagagtgaggccggcgcgcgtgggaggccatcccaaggggaggggtcggcggccagtgcagacctggaggcgggggccaccaggcagggggcgggggtgagccccgacggtt

SEQ ID NO: 50087 - DNA, 555 bp, Mus musculus
  source 1..555: mol_type = other DNA
tggcgtcaatgacaaagatgtctttccacccggtgcctccaggagcccagggtctagggagcgtctggctgtgcctaactggaggctgcaagccaacacgtgggaagccataggtgctgcctggacctgggaacaggacgaggcggacctagatgactatcgccagcactgttcaggccagcagctctggctagctctggctgctgtacagcctgctcctagaacatcccggtagattcgaggatccagaggtgggcgcccgggagagctccgggcctcgcttagtccccagggtcctgtggggaccttcataagaaggtggagccacatagggtggcggccggtcccagcggcgccttggggctgtgcctgcagagcctctcaacagcaggtgagcctcgtagctagggggccctggccttctgcctccccatggccccgcccatgcaacccctgggtcaccctgcgggagcacggatggtcggggcgctcgccccacctgcccgaagcgctctggtcgttgggctgcccgaagggcgttccggggctctgggc

SEQ ID NO: 50088 - DNA, 374 bp, Mus musculus
  source 1..374: mol_type = other DNA
taggaaagaaaggccacttttatcttttctgggctgtgccacaggaaatcctggcttctggccaaggacacatacaggtgcacctttctgaggtcttgggggagcagctctcccccagagtcgcacaaacagagaccttgagttctgttctcaccactccctgtcccactcgcaggtcccattaggcttgggggacctgagcagtgagtgggaaggggcgtccaatcccaggccccagggggcggccgtgcacatgggggaggaagcagcgcggagccgtccacggcggcgtgtcacatgcgcgcgcgctcgcgcgctagcacacactcacacacgcacagacaggcacacacgtgtgcccgggtatatatagt

SEQ ID NO: 50089 - DNA, 311 bp, Mus musculus
  source 1..311: mol_type = other DNA
atttagtgaagaaaccttatacagtttttaatttttatataaactataactcagacccacgctacagaaatggttcccttttcattctgaactgtacataatttatgttgcgagagaacaagttttggattttgcttcttcaaagtttgtttttaaacgataaataaaaaaagaacattttaaattcgccgttggccagatcttaaggtcctggagagctgggagaggctcagccaccgccggaagggtgggttccccgccttccgccctgcggctggggtctgacgtaggcgcgcggcactggggcgggg

SEQ ID NO: 50090 - DNA, 696 bp, Mus musculus
  source 1..696: mol_type = other DNA
ctcgagtggggttccccaggcaaaagggccccctgccctaccggccgagcaggaggcggaggggggaggcggagcggcgccgcgctgcactactttcctcgtttcctgaccccccggcgccgggagccggggttggaccatgcacctctagaccccccgcgatcagtgcctgccgggggtctagggggtgccgctgaccacaggcggccaggccgggggcggggcagctcccgaggccagcggccggaggggagcgggcagagggctcgcaccgcccgccccttcctcttccccaccaaccctcctcccttccccggggggagcagaaggtggggggctcgaagccgccgaggggggacgctcggggtcgcggagcccggcgctgggtgtgtgtcaggttcggccccgccggctccgcgtcgccgtagctcgcgcggccccggggcgccggcccggcggggagaggggctcggcgcggctgcgaggggctcacgttccatccgggcccggcgcgcggcgcggcgcggcgcggcattccttccgggctgctggggaggcgcctcgacgttccatctggagagcctcgacgttccgcccgagcccggcgcgggcggccggggcgctggccgggccctaggactgagaggccgccccgcgacgcggatgcggagcctgctcgcccaagatcaagccacc

SEQ ID NO: 50091 - DNA, 267 bp, Mus musculus
  source 1..267: mol_type = other DNA
gcttgatcttgtattgagtgtcctgggagaactccagttctgtgaacaggtttctctgtgcctcaaactctgagactccgtgcttcaagggcctaggtgcacccctttgatccagtactggaagatctatagagaacagatattttggtacctctaggaccccgggttcctcttttctttgaatgaacccacgtgaggcccgccctcctcctctattctaatagacctgtggggcggagccgggagccgcccggctaggtatcccgc

SEQ ID NO: 50092 - DNA, 259 bp, Mus musculus
  source 1..259: mol_type = other DNA
ccacacaaacctggtgtggaacttggaaagtcctggcctggcaaggtagatcaatataaaaccaccaaggaaaatgatcctctcctaatttagactcggaggtagaaggatgcttatccaggcagccaggactctaaagcttcagggatttcctaagcaggtgcctgcatggtttccaggacacttactgctagatcccccgcccgggtgggagggggcgggacagcgggcggggcccgggaccaagccgggcagcaga

SEQ ID NO: 50093 - DNA, 293 bp, Mus musculus
  source 1..293: mol_type = other DNA
ctgggatatttcctcagtcgggatagcctgggcctggtaatacaaaacaaaagtttcatgacatttttaaaaagtctcctgtttttttccacaaaaatatccctgagttcgagaccagcctggtctacagagtgagatccaaggccttgtgtcgtcactaagcctggcacttccgcgtagccgggcggcgggtactaccccaccttaaaggggaggggaccgagggggacccgagccctttaagactaggcgggctggggcctgcccctttaagggcggggcgtccgaccgca

SEQ ID NO: 50094 - DNA, 476 bp, Mus musculus
  source 1..476: mol_type = other DNA
tgcacagctgcaaggattctgtgctccgatttctgaaataaattcgggagaaatccctagtatttttctgtaagaaatttccaatttagctactatttcaaatgttttaaatctttcaaaatcttttgaaagagcctttacttgggttattccattaagttagtagtttacggctaaagacggggcctagagcgtggccacgtgaatatgatcaattgagctatctggatcacaagcatattgggatgctgcttcaccacccgttgccgccccgcattgcagcggcgcgcccctgtctgcagcatggcgcgcgccccggcggcggccccgccccgcgcgcgggcccacgcagggagggggctccgaggcgagcccgcctctgcggcggtcaggccgggcgcccagtggacgcggctggcccggggaggggccgtgaccagcgaccgcgcccgcccctccccagctgctacttaaga

SEQ ID NO: 50095 - DNA, 382 bp, Mus musculus
  source 1..382: mol_type = other DNA
tccatattagaaaggataaagaaagaaagctctctagtattaagtactactttgtatattattatccagggtatccccggtaagatgaccttgagctgcaagtcttcctgcctcttaaagaatactttttaaagcaaatagagatgttgaattctgacagaacgtaattaaattcagtatattaaaaatgaaaagctggaattttccaaaaagattctaaacataaattctgtgattaagtgttgggaaaaaccttagatgatttttaaatacagtttaaggtttaaactacgtataatgagattacctcataccattctctgggcagacagaggggtctggaccaacaggaaaaggccctggcccatccccatggtgacag

SEQ ID NO: 50096 - DNA, 213 bp, Mus musculus
  source 1..213: mol_type = other DNA
taagaaatattaaatattgaaaacccgacatctgtctgtctctatggacacagaccagtggctttagcattagatttatatgttaataaactatcttatagaaacatgcggctagcagctcttgaaatgacttcatggcacaagcacaagcgcagagacccagcgcaggcgcgctgtgttctcacgcctccgggtggttaacctgaggtatta

SEQ ID NO: 50097 - DNA, 328 bp, Mus musculus
  source 1..328: mol_type = other DNA
caagagcagctggcctgtgagctccaggctcttcctgtctctctctccttagtatgaagaggatgaatggcacttctgagaaatctgctttgcggagttgttcagacaagacgtctcccgcggtggagacactcctctcctcttgactgtaaaatgaggagaggagcccccgggctcttgggccagagagagtgttcctctcataatgggccgaataattttgtgcctcttaaggctcttaagactcggaatggcaactgagacctagaaccggctttggcttgagctaacttcagctccacccctgtgccgtcaagttgactgggcg

SEQ ID NO: 50098 - DNA, 419 bp, Mus musculus
  source 1..419: mol_type = other DNA
tcctctcctcttgactgtaaaatgaggagaggagcccccgggctcttgggccagagagagtgttcctctcataatgggccgaataattttgtgcctcttaaggctcttaagactcggaatggcaactgagacctagaaccggctttggcttgagctaacttcagctccacccctgtgccgtcaagttgactgggcgggcagccgggctccaaggcctgggtggggcgaccgagccacaagtgcggcggcgcagctgtgagtccccggtggctgagccaggccgcccccctacctggccctggcgtggacccgagtttgatttgaactttcgaacccgccaatcatcggcttcgctgcggcccggggcggggtccggtgtccgccctcccgacgcgtggcccggccagggtatataagcc

SEQ ID NO: 50099 - DNA, 322 bp, Mus musculus
  source 1..322: mol_type = other DNA
gctcacaggccctttcagtctttaagatggaaacatcagctgcagagctggcgccaatcaccagccctggggagtaggcagagataagctcttccccagctccctctgcctcagccctcggttgtggccaatgatggggggtgtcctcccattctaggctccagcgttggatgcatgctctaaggtagacctaaggggtggtgtcctctctctgcagggtggggcatccccctccccacacagcccaaggctgaagtcaggccagtgggaggagctgtcgtggccccccaccccccctccccggagagggctataaagccgc

SEQ ID NO: 50100 - DNA, 553 bp, Mus musculus
  source 1..553: mol_type = other DNA
tgtactaatgaataataataaataaatcttttaaaaaaataaaataaaaccaagctctgtgtgctctgtttcatctggctaaacagctgattcctggcttgctggtcagcaccctttaaactatgcagggagtgtgcaatccgagcttcctgaagcaggaagctgcgagtttcaggtggggtggggtgagacattgcccacccccatctccagcagcctcacagttgcctgccagtaaggagcaggtgaaagatgcagagatctccccacccaggaggagcccttcaattctgattaacagagctccctgggcctgaccacatcccaccagggtgtgaggtccgagtgggcactacgttcagagtgtggtcaacagtggtctcgatggccaatctttgggctccagctctcgcgagagtacggtaatgcccgttgcagtccagactggccttcccgctccgtcctcggattggccgagagagtggccccgccttcggagcctgcggattgggtggctccgtgtgacgtcacgaccctccgagtcaccgggtac

SEQ ID NO: 50101 - DNA, 305 bp, Mus musculus
  source 1..305: mol_type = other DNA
gatccaagcttcttttaaaagaaactgaagccaaggtcagcatcttgtaagccagctccattccagcgtccaagcgagaaggcaggctcggtgtgggttcccccccctcagactcccaggtctggctgtggagtcccctaactggaaggcctgagaggaagtcgagggttcggacagctttgaccaggaatgtcccaaccttgcaaaaacgcctgcggtgcaagaggtgcgcactgccgggagtggggcgcggttccaggccctacagtagggctttcggggcggggcctgcaggaggtggcctg

SEQ ID NO: 50102 - DNA, 514 bp, Mus musculus
  source 1..514: mol_type = other DNA
gatgatcggctggaagtgtgaggtcgttcgctcgcacatcctctctccactcccatcaggctgggtggcgaaaggctctaggatcccattgggaatccggccttcccgcacgcggacgcgagtacgcgccctgcttctcccgcaactcaggcgcgcgaaccccgcgcgaagggagagcgcctgagaggagcggtaacccggccgcgcgccccggtcccctcggctccggtctcccgcgtgcggcgcatcggggtcgcgccggcgcgagcgcgcgccctgcgctccggctggcggggggcgcatgcacgagtacgagcgcgcgcgcacgcgcgggctccgaggcggggcgagaggggcgagcggcggcgcgagtgcgggcggacgagggtcgctgtggatccgcgggcactccggccccagccgcgcctgcgaggctctgccggccgcccggcggacgagggacgcggggaaggcggcggtgggggcggggcggctcggcgtcgggcctcgggcg

SEQ ID NO: 50103 - DNA, 253 bp, Mus musculus
  source 1..253: mol_type = other DNA
tttccctgtgtatctgtgaacaaggctggtctcaaactcaggagatctgcccaaatcaccaaggcaatgccagcatagctttggcgttgacattctgagttcgaggccagcctggtctacaaagtgagttccaggacagccagggctgagagaccctgtgtctgtctgcggacactccttggatggagaggtttccccagacccagggacctcgccacatctggggcctttacccagggaaggctgccccagc

SEQ ID NO: 50104 - DNA, 410 bp, Mus musculus
  source 1..410: mol_type = other DNA
ctgttgactttaaggccagcctcgtctacagagcaagccagggctatctatataatggtgagcctacgtattaggctcagagatctctcttaattttaccagtgaatcctaaattaagaagggtcaagggattcctgactcatttgttttccttaggccacagcctgggaaggtagatggaatcccactatctcgctagcgtctcgtagaggcctggcaaagtgcttgccagggcacccccaaggtgagggatcactcgccatctggctctgaggcccacaggccggtggttgccacctgtgcgcatgcgtaacaccgcaggccagagcctggcctgatcggacttacgcgcagatttttcggggcgataccggggcggggccccaaatcttgttgtggggttgtgcccc

SEQ ID NO: 50105 - DNA, 462 bp, Mus musculus
  source 1..462: mol_type = other DNA
ctagtttcaagtataccagaaaactttgttttgggttagttcaggggcacgctgggcaaacgctcttcccggaagctcctccagccagagctggaaagagctattctctgggaactagttctttctttcaaaacagtttcctcagggaacactgtcctctgaaaaggattcggttgaccccagcagtctagatggagttcttctggccgctccttctaaggagtgtttccttaggaacggtactgtacgccacagttagagctccagtcctgtgcttagcaaagagcctgaccgaacggcggccccgcccctcccagcgtcgcctgggcggggtctcagcacaagccccgccctcccgctgcgccaacacggaaacctccgggaaagctgtatttccggctccccgcaaccccttccacttacgggtccaggacgaaccggaagagatcgtccaacccttcg

SEQ ID NO: 50106 - DNA, 117 bp, Mus musculus
  source 1..117: mol_type = other DNA
ggtggctcttctgtagtgtacttagagaataataataaataaatcttacctgctatgattatttatcaacttaggtgttgattggctctgattttaaagtcagcaaacactcttttc

SEQ ID NO: 50107 - DNA, 697 bp, Mus musculus
  source 1..697: mol_type = other DNA
ttgataaagccaaattgtctatagacataaagaggtgttttcctgagtcaggttcagaaacctacagaaggaaacagaacgtcttggtctttaccccggctttggaggggtagagcatgcatgcccattaagtagcttcgagttcccttatctacataactgaacgtttatctctcactgtagatgttacagaggcagattctgtttgcccgacacatacgagtttaattaatagttcttgaattaagaaattaaaactaaagcgcgcacgcctttaatcccagcactgcaggctctgagttcgaggccagcctggtgtccaggacagccagggcaaagagccgctctgtgaaccgctgtagtgccggccgcggagtcgcgggcaagaagggggctgtgagccgggagagccacgccgccctgcgcagccagcgcgcggtcagtcccaggcccgcccaggcgcgctccgcccccgggggtgggcccaggcgcgccccgccccagggggcggtcccaggattctgcgcacgtgggggcggggcctggcgctccgggccgggggcggagccgggccgggcacaccgggccggttgggggctccgctcctcggcgagagcaaccggagccccggccacgaaggggtgcgacccccccactggccccgccctcccggccgaagcccggccaatcagagctg

SEQ ID NO: 50108 - DNA, 329 bp, Mus musculus
  source 1..329: mol_type = other DNA
attaggtcacagcaatcacctttttaaaaacgtgcattttctaggtgtttttcctacgtatcacacgtgtgaagggtgagcagctctgtagttgcttggaatggaactcaggtcctccagagggacagccattgctcttaacaataatttcaatcactgtcctggactcactttgtagaccaggctggcctagagccaggctggtctccaatcaagcagtccttcagccgcagcctctccagtgctggaatgaagacctgaccaagggccaccagggcgcgctcgcagccaggcgcgaggccgccgagggcgggaggctctaggcgcgc

SEQ ID NO: 50109 - DNA, 487 bp, Mus musculus
  source 1..487: mol_type = other DNA
aaattgatttttaaaagcataggccacaaaaaataaaaataagaaaataaaggctcctggtttttggtttttttctctctacctgctctttgaccgcccttggccaggtctctaaagagctggttaggattgcaagaccaggtctttgaggccggcagggccttgggtaactaccaaaaaccactcacttccatgcaggtggttgtggtttgcttggggctcctgagctaccgggtagcctcagaccctccaggctggggtccctgggtccctgtagaatggctggcccttcaaaggtgctctgacagcacttaagagactggatcccagggagagctgcctcgctagaggcttaaaaccagcatctgtgttccatccttcctatgtagggggtattagccaatgactctacgaaagcggctgctgtttatgaacgtgcagatgagaactcgcctgggcaggtggggcgggtgtgggtagacttcca

SEQ ID NO: 50110 - DNA, 365 bp, Mus musculus
  source 1..365: mol_type = other DNA
caaggtcagccaggcctatatcatgagctggactgtactttcttcttccctgacagaaagtagctaaaaaccaggcctcacaagtgcgaggatttctcatgagcaaccacgccccttgcttcttaaaccagcactccagatttctgggaggtccccgacctagacccacggaagcagacgcgcatgcccgtgggcccgcgcaaacctacttagtcggccgggcctggcatcccgatccccagcaccaggagcaccgggagcaccgcgaagggtcagctccggcctgaggattctccgcaggggggaggggaggggaggccctgcccactcgggcggaagcggcgcgcgccggccgggcagactta

SEQ ID NO: 50111 - DNA, 367 bp, Mus musculus
  source 1..367: mol_type = other DNA
ttaaaaccagcatgtgttccatccttcctatgtagggggtattagccaatgactctacgaaagcggctgctgtttatgaacgtgcagatgagaactcgcctgggcaggtggggcgggtgtgggtagacttccagcgccaacccccggccgtcgagaactaatgccgcgcatgcgcagcagcgccggcgggggcgagtctgcggggtctcccgggcagcgaaggcaggcctcttagcgaccctcgcttgcgtccgagttcagggcttgaattcgggacgggtcccccacccctgactttgaggtaaacgaaagagaaagctgtgtcgttgtggtcaccaaggctgccctgtcacggcggttatgacac

SEQ ID NO: 50112 - DNA, 416 bp, Mus musculus
  source 1..416: mol_type = other DNA
catttaaaaagcttttaaagtattactatttcctagcgtgtgtacacgtgtgtagagtccagaggcgacagaatctctcagtgggcctggaaccaacgcagctaggctggctagccggcaaatacaccttaagtttaatcttgtacagttttcattcaacaagtatttactgaacaaccgtgcgccaggatttatgataaatataggaggttcacagctgaaatgtagcactaagtctatagtctgtgtcagtgcattgttgtgtgaccccgtcacaggcccctcactttgtgtatctgaaaagaaagaaacttggaccttggtcagtggcccaaggttcaactcacggcctccaataggataccgaaagccccgaggcgcatgcgcgctggcgctgcgctcgccccctccctccg

SEQ ID NO: 50113 - DNA, 304 bp, Mus musculus
  source 1..304: mol_type = other DNA
ttcagtctattacccatagggctctccttctcatagagagatgctgtagctcagagagggtaagagtctagtctcacagaggcactgtgggaacttctgaaagagacagcaactgcattctcccagacacgtcagggtgtgggtttctcagtctatgtgaacgctgaaaggtgtcagggagtcctggcaaagctccccggtcccctgggggccaaagcgcatgtcttgccctgctctcaggtccgcagcatcctgcgtccgcagccctccccccgtgtgcggatggtacgctccggtaagcctg

SEQ ID NO: 50114 - DNA, 505 bp, Mus musculus
  source 1..505: mol_type = other DNA
gcaggcaccatggcctccttgagcctggagagctagctgcaactccagaaacatcttcctcctgtggctctgagctcgagatggtatctagatttgggggagacctgtttgcctcaaaatgcaaatagcactgagcaattaatgcaaatctctgtcctatgagatagttttattatcaactgtcacatctcaacgacatgagtgtgtgctgcagaacagaaagaccttggtgactctatcacgcagggctagggtcccagggccactgaagccacctttggctccaggcattatgggtgattaactgcaagaaagcaagcccaagaccttttgccttggaaatttgtcccaggcgggaaaggcagcgcccacatttcctcacagtttggggtaaggcattgccccttccttggccagccttttagtcaaagagaaggtcactgcacggggctggggcagccctgaggcagctccagggagcacagggttggcaggaacgcctcct

SEQ ID NO: 50115 - DNA, 444 bp, Mus musculus
  source 1..444: mol_type = other DNA
agaagaggccaagaccctttcctctcccgctgcctagaggcaccgccacacgcggcgtcgaggattgccgagtccaacgcccccgctcctgccgggctggaccggggagaggcccacgatcgccgaaccgcccccgccacgggcggataaggagctaagaggcgctgtcctcagagactctcatcactctgacccgtccgtgggtgagaccgaccgggtcgaaggctgccggccggccccggacgccggtaaaggccggccggagagggaggagagccgggaccgcgctcagccgccaggagagcccagcacgcacgtcgaccaggagggcgcgggagcagcgctgagcgcacgatgcgcgcgacccagaccgccgggccagtctacactgccgcgtgggtcacgtggcccgggcgggtccgccgctgtgcggccggggggccg

SEQ ID NO: 50116 - DNA, 584 bp, Mus musculus
  source 1..584: mol_type = other DNA
agaagaggccaagaccctttcctctcccgctgcctagaggcaccgccacacgcggcgtcgaggattgccgagtccaacgcccccgctcctgccgggctggaccggggagaggcccacgatcgccgaaccgcccccgccacgggcggataaggagctaagaggcgctgtcctcagagactctcatcactctgacccgtccgtgggtgagaccgaccgggtcgaaggctgccggccggccccggacgccggtaaaggccggccggagagggaggagagccgggaccgcgctcagccgccaggagagcccagcacgcacgtcgaccaggagggcgcgggagcagcgctgagcgcacgatgcgcgcgacccagaccgccgggccagtctacactgccgcgtgggtcacgtggcccgggcgggtccgccgctgtgcggccggggggccgggggtgcgcggggcggggggctgcgagcgcgcgcccgccaggctcgctccctgcgcgctgcgctggcctctgggcgcgggagccgcccccggcccccccgcgctctgcccgccgcggggcgcgcgccctctatatagcgc

SEQ ID NO: 50117 - DNA, 347 bp, Mus musculus
  source 1..347: mol_type = other DNA
tctgaggcaggccaggctggccttgaactactgtttctagtaaactctagctagccagtattttgtcaagttgctagtagccacacctaccagtaattagtaaatcagatctttcaaagtttcaaagcctctgtaccaatcaaattttaagtgccacttattaaatggaattataacacttcattttgcatttctaagtgcttgctatgaaattggagggataattatagctcagtaaatatggttaaaatgagacccgaaaactattcagttattagttgaaacacccactactcccgcaaaattgtgtgtgtgcccttagtaattaatgcgcatgcccattgcgg

SEQ ID NO: 50118 - DNA, 396 bp, Mus musculus
  source 1..396: mol_type = other DNA
acagctacaggagcagcctccaggtttcaggaccagatttctgatagatctgccaatgaggcacttgcacacgggctgcttatatacaaatggtgaatgtgcctgtatctccacacaggcaaatgcttgaatcagtcaagtgtgactgttacacgtgtggggagggggacgctgggggcagacaccctccttcctgcgcgcacacgtgcgcgtgcacacacacagagagcggagccggctccgggatccgaacgaggcagctctgctgagagcggcgggaggaggcgagccagcggggggagccctcggttccgctcccgggccgggggccccccgcgcacaccggcccagaggcgcgcacgcgccctcccgccgcctcccggccggacgatggat

SEQ ID NO: 50119 - DNA, 120 bp, Mus musculus
  source 1..120: mol_type = other DNA
gtcagcaagctttcagcttcaagtcccccagtgctgggaactggtcagagtgggcgtcacctcacctgaggagagggaagccagtgtcagacaaaagctcatcatcaattattcatcatc

SEQ ID NO: 50120 - DNA, 339 bp, Mus musculus
  source 1..339: mol_type = other DNA
tgtaattccagcagtagagagcagctatcttccattacacagtgagtttaacgctatacttgatcaggtaaacactgataagttaaacgtctgaggctggaactcactctgtagaccaggctggcctcgaactcaggcttttcctctttagtacccatcactccagccgccagccggatggctccctcctggcccgtgaaggcgggagggagtggtcagcacgcctttcccgctagtcgccccctcccgtagtctcgctgctccgagccgcctgtgcccgccggcgggccgggcccacaaacagcccaggcgctcggggggcgcgcggggggcgggggg

SEQ ID NO: 50121 - DNA, 275 bp, Mus musculus
  source 1..275: mol_type = other DNA
ctgaggtgaaggggcaacctgtgggtccctgacctgcaagtaaccaagatgaccttgttattttacacccgtggtggagctaccatcatgggacatcatcacatgctagctagcgagagcgatgaggcgtttgcctttgaaaacatcgcttctctctgaaacagactagcgcgtggggtagacaaagctggcctggcctcagcctcagttcctagtccctgggtgccagcctctgggccacctcaggggcggagcttggctgcacccacgtgtgg

SEQ ID NO: 50122 - DNA, 257 bp, Mus musculus
  source 1..257: mol_type = other DNA
ttgatattaaactaacacattaaggtgccctgtcatcgatcccgactgggctggaaccctcccaccccgggcactgcatgcatgttttactcaatgtaagacaagaagcagggtctgtcacgtttggcctcactagtgctggtccagctcaccctgtaaagggccgctccaggcggtagggcgccgcacctagctaaacttagactgcggattggctaattctgagctaaaatttttaggagcgctcttgatggacc

SEQ ID NO: 50123 - DNA, 275 bp, Mus musculus
  source 1..275: mol_type = other DNA
gatcccgactgggctggaaccctcccaccccgggcactgcatgcatgttttactcaatgtaagacaagaagcagggtctgtcacgtttggcctcactagtgctggtccagctcaccctgtaaagggccgctccaggcggtagggcgccgcacctagctaaacttagactgcggattggctaattctgagctaaaatttttaggagcgctcttgatggaccgggtccggagcggggctgagcaccagtggctgaggagctgcggccctgcggcggc

SEQ ID NO: 50124 - DNA, 290 bp, Mus musculus
  source 1..290: mol_type = other DNA
gacagatgtcattaaaactccattaccttctgcctcaagaggggagaggaggaaccttttgtcctgtactgtattaaaaggaagggacaattctctccctttggtcaccccagtggaggctggaattacaggcttttaatgtaaagatatttcaaagccttgtgttttctctgagaaaaagtgaaggccaccaggacacgtggcctgggcacgcggggcgaggccgggacccacatgagggaggccatccttgcgcggaagagggtggccgtaggccgggccccgcctcg

SEQ ID NO: 50125 - DNA, 205 bp, Mus musculus
  source 1..205: mol_type = other DNA
atgcctaattttacaacaagcatgttcccaccttttgacccaagtgaaagtgaactgttctcatagataagatctgaggtttatagataggtgcagtctctgacattgacctcagtaattataattagaagtgcatagttacaggaaagaattcctagcaatacaatggtcttgagagagaaaaagtctctcccttccaatgtaa

SEQ ID NO: 50126 - DNA, 372 bp, Mus musculus
  source 1..372: mol_type = other DNA
tgcagacactgttgagaagtgcaagcccactctagggtgtgtgctactacccttctcttagagcctcttttaaaaaagacttttatttaatcttattagtatgtatagtgcagttcctcacggacgccagaaaatggtatcaggttcccaacagctcaaagggaaactcaggtcctctttgcacagggcatggcaggaacttccctgaagttgcacttagaccagatttctgggtgagtctcagatcaaactgctgcaatccacgccgccgggagcgagcacgttcgctccaaggccgcgcgggaggcgggagacgggcgcgcctccgcggcagggggcggggctctgagcggggccggggcggggccgcgg

SEQ ID NO: 50127 - DNA, 390 bp, Mus musculus
  source 1..390: mol_type = other DNA
gccagtatttctgcctcagcttcccaaatgctgggattctgagtatgagccacacagaaagtatggcacattaagaggccagttttaaaccatgagtttacaaggagcttagaatttatttaaatttcccagtaaattctgcttttaaaaagtagagtacttcaccctgaaattgtgagcacaagctacaggattttggtttccaagtttgtgagcacctggagacgagccctggcccttggcaacaacggtgcttgattctaggcaaagcgcgtcttcgaatatggccgatttataatatcatgctaataatgctgctgcagggttccactggggaatcttttcccgtgaggatgtccaccgtgtcctcccggaagtccttccgctgag

SEQ ID NO: 50128 - DNA, 358 bp, Mus musculus
  source 1..358: mol_type = other DNA
tgggaactaaaacaccttttttgtgttctgttcagatcttgagagaacccaacccaaagtcatttttaaaaatatgtagagtctagcagatgatactgtaaagtttatgggtccataagcacagtaaaactatgtaaagatagagaggcctcaacttttgcccagagaggcaattttgtgagtcaactatgaaaccccaaagtttgtaataccttctaagctatcaaatggtagaaaagtcccatacaggcttaagcctacctagaacgtaattcttcaatgcaggactgtgtctaatcgtatagaatgtctagttctttacaaagctaatagcatcatcaagacttgaatctttgaa

SEQ ID NO: 50129 - DNA, 471 bp, Mus musculus
  source 1..471: mol_type = other DNA
aaacacacacacacacaaatatatatatgtaaattttttatttttttgttttttttagagtttctctgtgtaggcccggctcatgtttttttaaattaaaaaaaaaaaaagtgtttgaaagaataactctagtaaaaataattaaatatttgtatactattttatttgactatgaaaacataataaagaagagatctaggctaattatttttagtagagcattaagcatcacagcggagcatcattatgttaatgagacctgatcttgggctaaagttttatcaaagttggtcttaagattaacttatgcaacagcccggcgcggcctcccgggcgtcgacccacacgcgccgccacagacgagcctgccggagcgaagcacgcacaggggcgggcaggccctccgcccccggaagcagttttcctccagaaccggaaacagttgttgcttcccgggaggagcggctgacg

SEQ ID NO: 50130 - DNA, 301 bp, Mus musculus
  source 1..301: mol_type = other DNA
tttatgtccttatgtaacacaaatacacaatgaaaaataagaattgcttatttactttattgggcatagttaacaaatgccaagttgcaaagttgcagctttgctggattgacgttttcacaatgtaagaacatatgattgccaggcagtcagctgatgagaaattaaacttcattatttgtctaagacagggtctcggtgccacgcaacccaacaaaattttggtgcagcttttctactctcttaaaaaaaaaaaaaccgtcccaggcggccccgcgaggcctcgctcacccccagcgcg

SEQ ID NO: 50131 - DNA, 465 bp, Mus musculus
  source 1..465: mol_type = other DNA
aactgatttctttaatatctttaaatgaaaacgaaaaatgactctgggctatttactatcctaatatgagccaggttgtctgaagacagcacagtgtacttacatataataaataaataaatctttaaaaaaaaataaaaaaaaataaaaagatttggaaattaattccttaagatgtcaactgcaagtggcaacaacttcaataaaatatctgggactcaagttcctatctgtaatttgtttttatctatactaacatggttatatttatgatgtttctgtcatatgtattaagtcatataatacattcgatatgtaggaacgttagtaaattgttacaaaacacagaaatctacaggtttttaagtagttgtctatatgtatgtatgtatatatttgagacagagtctcacttccttttcaaagaaatatagctactgccagagttttttttcttggtaaaga

SEQ ID NO: 50132 - DNA, 309 bp, Mus musculus
  source 1..309: mol_type = other DNA
gtgtagccctggctgaataggaattccatgtagaccaggctggcctttataccgaagtgtagaggtctgcagaggtcctcaagtggcattagacgcccagtgctgagaactgagcttaggccttctgcagttcttttttaagagatgaagaggagattgaagtcatatgcagcaggtgccgcatcttcccaaggagagcagagcaggcgacggcagcctgcgctctccaagatccgcggtagagggcgctgtagccacgcccgtcctgcgtctccggggcgggacgagctccaggccggggggcggggc

SEQ ID NO: 50133 - DNA, 473 bp, Mus musculus
  source 1..473: mol_type = other DNA
gagcctgggtcatctggcccactgtgagccatggtatggccatttactcactgtcaacattctaggttgctttacaacattgaatttctacttatgcattctataagaaaataacatttttgagaaacatgctaggtgatttgatgtaataactaaggttactcagttcttgaaaattatagttttggaaagccgatatgaactggtttaccttagactttgatacagtcgcaggtaaaggcactcgccctaggaccccagccggcgtgtccacatacatacatgcacacacacatgcattacatacatatactatacacattcttataatgatgaataaaatctttttttaaagcctgttttaaaagagcgagtgcttttcattccttcaaaagcaaatccaacaggtccagccttatggatacagctgttaaactgggaaattccgaattctaactgtagccgttcctagt

SEQ ID NO: 50134 - DNA, 433 bp, Mus musculus
  source 1..433: mol_type = other DNA
tataatctcaaaaaaaggaccccttttaaaaacatgctggcctgttgttcaggccaggctggtatctgcaagcactcttgcctggaacggcaatttccataaatttgatagcgactccagagaggttgggtaactagcctaatcagtcaaaacccgagtacttctatttaaaggtaatcgtatgttctgaaggaggtgtcaaatacaacttctcaaaacatttgataatgcactttgtagagggcatgctttgcagggtcagctgtcccgcccgcgagagagggaggtcaggaccccgcgccattgccccaagatccccggagctcccccagcgtccccgtggcggcccgcgcgctcccgagctcgccaagatggcggcgctcacgtgaccacgcggtgacgcagcacgccggcgcgcaggccacgcccctcc

SEQ ID NO: 50135 - DNA, 503 bp, Mus musculus
  source 1..503: mol_type = other DNA
cctggagctccaccattgcacaccgaatccagagttgagtgggggtttccgtcaacatttcaaagaatggtggacccctgcatgctggttacttctgcagaataagcattctttaacaaaaaaatggccacagatgctcagaccatttttaacatttttgtttgaaagagtcccacataaaggggataccatttatatgtaggcaaccttcaatctatatcaattggtgtagcccaggctggcctcaaactcagagatgcatgcatggcgagccatggcgcctgtgtccgtgagaggacatcttctgcaggcagcgccctccctccttccaggcccggtgggcaagcttgtgaggccagggctcccacctgtgaggtcctcacagccctgagtgtggggaggccttctctcccacctgaaatcctctgctgggccacttccggctgagcaaaggcgggaagcagctagaggaccagcaggccgctgccgccatcttggggcct

SEQ ID NO: 50136 - DNA, 372 bp, Mus musculus
  source 1..372: mol_type = other DNA
tggaagcaaacaatttaaaaagtaatttatcttctttgtgaatttatgactcaaaaaacaattcccgaaattgtgacagagatctgccatctcagcgctgcttgattgaagctattttgcgttttaaactgtcaaacagctcaacagtgacacagcaaagatccttcagatgaataattaacttatgaaaggctctgggtatgcgaaagtacacactgtgcactagccaaccgcggggtcagggttcaggctgcaaccttggatcactgagccggccaactgctagccggccggtggggttagagtcaggccgcaatcggagccctaccctggctctggagcgaggccaggagcctgcgctctccttcccca

SEQ ID NO: 50137 - DNA, 278 bp, Mus musculus
  source 1..278: mol_type = other DNA
agtcccaagttcttgtctctcactcatacagaggatggactcaagtgtccacacatgtgtgtactgcacgtgaaacatgtgggtgtgtgtgtgtggttttatacaaaaatcccaagaaccgagaaaactcttgtctttctgagatcgccataacctgttcagcttctaaaaacaaaagttcattcttttggctgtaaaaatcttactaagagctagctcgctgcatgagcctccggtgtgacccaggagggtcatcagtaacagatgctgttctttct

SEQ ID NO: 50138 - DNA, 280 bp, Mus musculus
  source 1..280: mol_type = other DNA
gggatccagactgattggctggcatgaagtgcttgctgcccaacctcaatccatgggatccactttttgtgtgtgtgtgattttatacaaaaatcccaagaacgagaaaactcttgtctttctgagatcgccataacctgtccaacaacagaagttcattcttttggctgtaatcttactaagagctagctacaatcccgaggctaactggcatgagcctccggtgtgtcccatgagggtcatcagtaacaagtgagggcaggaccctgaggtcagcttc

SEQ ID NO: 50139 - DNA, 326 bp, Mus musculus
  source 1..326: mol_type = other DNA
acaagggcagccagtgcaggacagacaagcctgcttgctcaagacctagggctctaagttctactccatcgggctggctctcagcgccttcctggatgcgcatcgtgcaggctgcaggtgtgaggactcctgcaggtgcctctgtactgaagtagtcctcacacgtgggcttcatgtactcgaggcacgcattccactactgaacgtgtcccgcagggatatcacagccacagaggacgcgagagacccctgagctttagaaaaacagtgagaccctgcaggggggttgtctctcagctttcttatgatcatcaattagctggaaa

SEQ ID NO: 50140 - DNA, 285 bp, Mus musculus
  source 1..285: mol_type = other DNA
atttaagaagcctttctccaacgcgaagagcagcagccccagccaggggcctttcggtgcagccgaactggctccactggtcgaaattaggacattggcgcgcccggcggaatcacgcctccggatcagccccgcccccgctcaggccccgcccccaggcagctcggatgggcggagcctccgttcccggtccgccggccacgcaatcccgcagctgcaggagtccagccaatcaggagaggggggctcccgcccggccggccaatcacgggagggcaggaggtt

SEQ ID NO: 50141 - DNA, 691 bp, Mus musculus
  source 1..691: mol_type = other DNA
tgccacggtggacaacgtggacagtttcccgtggtttccccacgggtcacgaaaaccaagggataaccgagtgtctccattttatacagcggaaactcaatgagtttgcaaactacccggcctaggacgcgaggccttggaaggcgcagggtcccaggctgcctcaaccgcgaggcctgaggccttcgggcagaccgcgcagctcccgcagccgctgggctgacagggcgctgcgctgcagggcacccggggctccgggagggcactgcggtcgcaccccccggccggccggccgcggaagggtggtccggtgtcccgggtggcggtgaagagccgaggcccgtgatcgtcggcgcctatgctgagccgggagccctcccggtctcctcgggataccgggttccctccccgggctcgccgctgcgccctccccgcaggctgctccagccccgtaggtcgccgtccgagccccctcgcacgcccgcgcacagcgggccgccgtaacccctgaccctgccagcaccccggcttaccggctcgcgccggcgactaacctcctgccctcccgtgattggccggccgggcgggagcccccctctcctgattggctggactcctgcagctgcgggattgcgtggccggcggaccgggaacggaggctccgcccatccgagctgcctgggggcggggc

SEQ ID NO: 50142 - DNA, 341 bp, Mus musculus
  source 1..341: mol_type = other DNA
ggacaagttgtcctcagcttaatctgcaaaggcaactttgccttaggcaactgtctgatagctaccacagttcggagactcttctctgggacgctgctcagaaaactcatggtttcgaaccgacatgctgcttaaatgtgcagcctgtgtcggctacacagaaaaacccctgccctggatttctgttttttctccttcagtcagtgtctacagtggatctcagaagaaaacttttaactcaattaatttttactaataactaggagtggcagaaatacaattcctccttctcatggccggtcaaagatgaaatttgatgtactcctctgcatatatagagg

SEQ ID NO: 50143 - DNA, 489 bp, Mus musculus
  source 1..489: mol_type = other DNA
agagaacagctttgcaactcttttgcaaacatgcaaacatttcatccttcgtcagacagctggacgcctagaaacccttgagtttcaagtagtcatcctgccgccagattgatggagggcggagccctgccggccgccgccactagagggcgcagcgccaccccgcgccgccgccatcggggccacgaccccgggctcccacagaggtcaagggcagcgcccgcggccccgagcccccagggaccgacgagggcactgggttcctcaaggagacgccgtcctcggctcacgatagcgacctcaggctgggccggcgctcgctccctcggggaggctcgcttccggtcctgcgcgcggaagcgtcgccgcgtccaatccgggtccccgcccgggctcgcccggggggcgcggggcggctcgcagccgcctgtcggcgtggaggggcggcgcgtgcgtgctgcggggcgcactctgacccggagacgacct

SEQ ID NO: 50144 - DNA, 401 bp, Mus musculus
  source 1..401: mol_type = other DNA
tacaacgtatggctggttggcataagattgtaaaggtaagccgggcgttctgagtttgaggccagccttgtctacaaagtgagttccagaagagctaacttttaaagatagtggcgcacgccgttagccagcctggagatccatcatataaatagataggtcattgctcataatttctcttataaattaggccagctgccgaggatccgcagcctcccgcttcaaggcgggcaactgccctacaggcgctctccggggtccgccgcgaatcagggtgggcgagggcttttgggcactggccgcctccaactcccggcatgccttgggtgtgggccaagtgtagtccatttcccaggctgccccgggcctcggccgcgacgcgccggcgcctataagaggca

SEQ ID NO: 50145 - DNA, 199 bp, Mus musculus
  source 1..199: mol_type = other DNA
tcttcgatgacgcagcttcacgcagggtgtctgaccccccgagttacgcaggggtaacgtcagtcagttggtatcaagtaagtgataaaaggagtggaaagatgagaactttaagttttcttttaccgtcctcaggttcagtggccgttgagttccacagtggaagtggaggctagagcagagcatcctgggagaggat

SEQ ID NO: 50146 - DNA, 339 bp, Mus musculus
  source 1..339: mol_type = other DNA
gaagggattaaaccctgtcttgaggactccgtgcttaattttaaaaatggccgtaattaatcctcaggagcaaggtggaggaggtatgatttcacctcctgctccatgcttgatttacagtttagtaaattcaatctcttggagaatactcttaagttatcatactataaataaagatgccagccctgtttcctgcgcgaatgccttagggagaaccgcagttctgctctactgtcagagcctgcgacccgggttcacgcctaagcactgagcccgcccactactccgggggcggaagccttcgcgtcgatagcctatcaccgctgcgaagacagaacc

SEQ ID NO: 50147 - DNA, 421 bp, Mus musculus
  source 1..421: mol_type = other DNA
ccgaggcctgttgttccgaggcgcggcgccccgcctccgcccgccccgcggctccaaactgcgccacacggtttatggggtcggggcccagagggccgagcggcggggggcggccacgtcaggtgcggccgcgctgtgcggcccgctgaagagagccgcacagaccgccactcggcgtcgcgggagatgcccgagtgcgccgccgccggaaaccccgccccctcgcaggccggccagtcgcggcaaggagggcgctcgcggccctgctctgctcggaagccccgccctccccgcgcgctctgccctcacggcgcgcgcctcctctgggctcggccccgcccctccctgcgcggcttcgccctcaccgcgcggccgcggccccgccctcctggcgctcctcctttctgcgcggccccgccct

SEQ ID NO: 50148 - DNA, 390 bp, Mus musculus
  source 1..390: mol_type = other DNA
tcctagacccccgcaggctgcaggtgggaccccgcccctcctgaaggtgggaaagcagctagctcagcagagcgtccgggaccctggtccctctgggatgtgcacagctgctccggagaccctgagccttagtgacgtccgagttccctctcctttacggcctagaggacagacgtgaacttgagggaaggcgacacggggtcccctatcgagactccaggagtcaagcggccccacaggccctgggtcccagtccccgcgaggcctggggttcctacccaccccttcctgaccgccgcccccggcggctggcgcgggaggtgcagcatgcggcaaagcgctttgcataaattatgctcatggaggagggggcgaggaggggactgcacc

SEQ ID NO: 50149 - DNA, 479 bp, Mus musculus
  source 1..479: mol_type = other DNA
actcacaacatctgtgggagtttactggctgcgtcccctcagcttgtgctggggcacggtctatctcaggacagggggcggggcgcggggacacggtccatctccgagcacgaagccaggcgctgggccctcgtctgggctgcgtctcgcaggcactgtggagtcgtgacagcctgtgttcacacctgaggcgactcacagtgaggaagtcgccctgagatgagctgactccgctttctttagggcggggccgcgcagaaaggaggagcgccaggagggcggggccgcggccgcgcggtgagggcgaagccgcgcagggaggggcggggccgagcccagaggaggcgcgcgccgtgagggcagagcgcgcggggagggcggggcttccgagcagagcagggccgcgagcgccctccttgccgcgactggccggcctgcgagggggcggggtttccggcggcggcgcactcgggcatctc

SEQ ID NO: 50150 - DNA, 555 bp, Mus musculus
  source 1..555: mol_type = other DNA
caacttttaaaggttatattttaaagaaaaaaaaaaaaaaagagttggtcaggtccgaccctcagtgagctacccaggtaacctggccagtgttttgagcaaaagtacagcactgatgaatatttaaatcaaggcgcttgcctcgggctaggaccaaggctgtaaaacggccttacgggaattgccactttcagtccccattttctccaccgcctcctgggaaggtcgcacgcggaaggtccaggtggccccgggaggtgctcggctaagtcgccccgaagtcgcggactccagagggcccacgcgtgactgagctcccgcgggacacgcccctcgctcgccctacagctggcgctgccgaccccggccgagcccggcacgggggcggagcggctccggacagtggcctttcctcccgggggaacctgctgagggcggccccgagctccttcctgtccctcccaccgcggtccgggctcggcggccgctcggcgcggggtcccgggcgcggctccggcgactctcggccgctcccaccccggcgagttcaaaagg

SEQ ID NO: 50151 - DNA, 479 bp, Mus musculus
  source 1..479: mol_type = other DNA
ctcctgaaactgaatcacaggacgttgtgaacaacttttaaaggttatattttaaagaaaaaaaaaaaaaaagagttggtcaggtccgaccctcagtgagctacccaggtaacctggccagtgttttgagcaaaagtacagcactgatgaatatttaaatcaaggcgcttgcctcgggctaggaccaaggctgtaaaacggccttacgggaattgccactttcagtccccattttctccaccgcctcctgggaaggtcgcacgcggaaggtccaggtggccccgggaggtgctcggctaagtcgccccgaagtcgcggactccagagggcccacgcgtgactgagctcccgcgggacacgcccctcgctcgccctacagctggcgctgccgaccccggccgagcccggcacgggggcggagcggctccggacagtggcctttcctcccgggggaacctgctgagggcggccccgagctc

SEQ ID NO: 50152 - DNA, 410 bp, Mus musculus
  source 1..410: mol_type = other DNA
aactgaggcgcctcagtggactctctagtgaatccatgggacaatgtaacagagtctggcttttgtcccctgatgagatgacagcccctgaatgaggaggcggggcctactttgcaagtcatgtttcagggtgtccctgacaggcagccaatatctaagctgcctgtgacctgagggtgatcctgagagagagatcctgcccgcagaaagaccttgccctgagaaagatcttttcctgagggaaaggcctccctgaaggagaccctaccctaagagagagctgccttgagagactctgccctgagggagaccctaccctgagggagaccctaccctgagaagagaccctgccctgagagagcctgccctgagggaaaccctaccctaccctgccctgagtgagctacctt

SEQ ID NO: 50153 - DNA, 341 bp, Mus musculus
  source 1..341: mol_type = other DNA
atttcattttattttatttatatagagtacactgtagctgtctttagacacaccagaagagggcacattcctgtggaccccatcctggtgaccagtggtctttgccccggtcctcctggggatctggaccatgatggggtcctagtcgtcctcctggggatgggaccccaatggtccacctggggagtggagtcccaaggtcctcccgtgatggccagtggtgggctgcagtggtcctttgggtggtccaggccgaccacgccccagcaggaggctgtaagggtgtgaaggcccgccctctgagcatcacgcaaggcatgctgggaggacgcactggggca

SEQ ID NO: 50154 - DNA, 352 bp, Mus musculus
  source 1..352: mol_type = other DNA
gatagagaggtctctgtatgtatagtgccacagtggacagtgggatcctcattcttcatcttgaattaaaaaaaaaaaaaaaagatttatttattttatgtaagtacactgtagctgacttcagatgcaccagaagagggcatcagatcccatggttgtgagccaccagtcagtgctccaggggacaactcgcaggaatccatccactcttccaccatgccgctaaggatttgcaggctgcgtctcaactgaggtcaactcagttgacttgggttagaatatcagataaatgagttgacttaaaattttgttcatttctacccatggccctgcccagctggcaggaggaagg

SEQ ID NO: 50155 - DNA, 436 bp, Mus musculus
  source 1..436: mol_type = other DNA
gggatcagtggtgctcatcacttctaatgttccttagttttaagcaccaggaacactagttctgcttttcagtgcctgactggtctagatctctgccatgtatatcatggcatgtaccatccggcgccagccgtaccacttacaagctggttgtactttattttatttattatatgtaagtacactgtagctgtcttcagacacaccaggagagggcgtcggaagagcagtcagtgctcttaaccgcagatttaaatccctcttatataacagatctggcttgacactaactagggtcatctggaagaagaatctcaactgagaaaactcccccatcagcccccatcagactggcctgtgggcagggctgtagggcctttcttgattaatgattgaagtaagagggcccagcccactgccggacgtggcactcctg

SEQ ID NO: 50156 - DNA, 182 bp, Mus musculus
  source 1..182: mol_type = other DNA
caggatggttaggcctaacatttatggaagaccagccaccacgtgggtgctgggaacacacaagggagggctgtgagctcacccactggtggccccgaagcaggagggtcatgcgcatgcgcatgcgcaggacttgggaggtggatcctttccggttgccggcatgctgagccgacactgca

SEQ ID NO: 50157 - DNA, 409 bp, Mus musculus
  source 1..409: mol_type = other DNA
ctgtaaagccaggcctctacttctttaagtaatttttgttatttatatatttatttgtatttatcaagatctccctgcccggagctaggttttaggattgtgccaaacctaaatctgaccctacccttggatagcaggagttcacttgccagtcctcagacgcctgggacagagcctcggggctcgctgccgcccagcccgccctgagagctgctggcctcgggctctgaggtccgcagcccctccgccaccgagcccgtggcttgctgctctcgccctgcggagcaggtggcctcggaccgtgcacccaacgtgagcggcctcgcatgccggggttgggagcggagtcacagcacctgcccgagcggggcggggcgtcatcctcgacaggacccgccctggacccgcc

SEQ ID NO: 50158 - DNA, 412 bp, Mus musculus
  source 1..412: mol_type = other DNA
attgaaaaaaaatatttttgtgtgagactaaccaggaagtctaggcaggcttgaacttgctgctatcctgcctcagcctcctgagggctagatgagcctgcaccactctcaggagacagaagacaaaggcccctttctttctgtcagtcttagactggggagacccgagtctcaaaaagtcggagggaaattttctattaatttaaaacccatcttccgactttcccagtcaggtgcagctgcgaaggacctcggagcccggaggccccctaaggggggaggcggtttcccggcgcggggagggggttggctctctggcgccctcctcccttcttcggtagcccagggtaccgccggacagcgtcctcccgtgctccgcgcgctgattggctgctcggggcgccctctgatt

SEQ ID NO: 50159 - DNA, 359 bp, Mus musculus
  source 1..359: mol_type = other DNA
aagcagtttaaaatttggtatgccccttcataatgattattacccagtggcaagaaggcacaaggaaactttgggcatgcccatcacctgtcgacttaccgtgagccaaatatatctcgagatactgtaaaatgcatgtaatggacacattatgtgtcaactgaattcctcaccttcaccgtgaagctccttaggcatgtggaagctgagtttggagaaggtaaggtgacctctaagcttccaaacagttgaccaaggatcaaccgactgcggtcgcacggtgaccgggcgtgcccgggagcaaggagactcttgtcattgaccagggctcgacgccggtgctcgtggggccggcgggg

SEQ ID NO: 50160 - DNA, 442 bp, Mus musculus
  source 1..442: mol_type = other DNA
gttttaaattatttattatttatttaatgtgtatgagtacactgtagctgtcttcagacacactttatggtaattctcaaccacaaaattatttttgttgctactccataactctaatttggctactgttacgaatcataatataaatggctagccactgcagggcctatggtggacctttgaatctcaagggaacgccaaggtgtaggatgtcaacctgttgggcctcatatccagcagctctggtggcccatagtgagcgaacagcaagtgtctgctacgggtgagcctcacatggtctggcccttccctcgatctggtccatggactgcattcctcttggagtacagcaaactattttaaaaaaagtgggtccctagagccactgcaggagctgaccagccgctgttcttctcgcctgcagctctgttgaagatgcact

SEQ ID NO: 50161 - DNA, 597 bp, Mus musculus
  source 1..597: mol_type = other DNA
ccgtgagccaaatatatctcgagatactgtaaaatgcatgtaatggacacattatgtgtcaactgaattcctcaccttcaccgtgaagctccttaggcatgtggaagctgagtttggagaaggtaaggtgacctctaagcttccaaacagttgaccaaggatcaaccgactgcggtcgcacggtgaccgggcgtgcccgggagcaaggagactcttgtcattgaccagggctcgacgccggtgctcgtggggccggcgggggcgtcgcggaggcgggcccggggacgctcccaggcgctcgggcgcggcgccccctgccggtcgggctccggcgcgcatccagtccggagcgccgggacgcaggccggggagctgcaggcgagcgggcgagcgggcggccgggcgcgcccggcagggtaggtgcggcggggcgggcgcggggcgcgggcggccgggcggccgggcggccgggtaggaggacgggcgggcgcggggcgcgggcggggggcgcgcgcggagggtcgcgcgggggcccggcggcgggggcgcgcggcggcgcgcgcggcgcgagtcatcaattatgcaagggctcgcgca

SEQ ID NO: 50162 - DNA, 192 bp, Mus musculus
  source 1..192: mol_type = other DNA
gcaagccagcgttcttaaccgctgggcagtctctccaaaatctactcctttgaagtggaaggacttgacacaaatttctcaatgtgttctataagaaagcaaagtatggaagtgcaggaatagaaaccctgactaagacctcttgcaaaggaattcactcagctctgagcggcagctttctgcagccatctg

SEQ ID NO: 50163 - DNA, 261 bp, Mus musculus
  source 1..261: mol_type = other DNA
tctcccttgctacgtaagctgggtgacctgagttcgtctccggagaaaaacagctgcacagaattatctctgaggtacctacacaaattgattcctgttgccggcctggcgggaccctgaatggcaggatctgaacagttgcagtgggcacagagccccggtcctctctggctcccgccctaaagtcagacgtaggagttgggaggtggcttccctgcctccccccaccccccaaaaaaaacctcacagtgatttcctctg

SEQ ID NO: 50164 - DNA, 295 bp, Mus musculus
  source 1..295: mol_type = other DNA
agctgctagctaagaccagtgggagcctcccgcctttctctcccccccttgccaaaggatagggcacctctcatcttgcaaaattacatgacaggcatgacacctcatcttttaccgtttgaaagatggattcccagctggtggaactacttcaaggtccgctgggaagaggaagagttgtgccccgcccccatcccgtggttggggtcccagcccgcagaaaagacaaggtggcctttccctctattctggccaccccgacctgagtgactcagaacggacctatctaggtttt

SEQ ID NO: 50165 - DNA, 333 bp, Mus musculus
  source 1..333: mol_type = other DNA
gaatgtggagccccaggctccgtctgtgctgacgacagacttgggctgtgggtcatccccgcctctcccacagcctggcagccgagaaaggctcagcgccggtcatgccccccccaggtgagggatttcaagccttggggtggccccagctagccctgggaaaggaactccggggcctatcatgtacgcgctgccgtgggcagctcccagagtgtcccagagcctggctgatggctgcgcactgtgggcggggctccccatagcggtccccccctggaggcggtgcctgcgtgtcggggggcgaggccactggaggccgctccccacgcctct

SEQ ID NO: 50166 - DNA, 598 bp, Mus musculus
  source 1..598: mol_type = other DNA
ctgaaaaccttagtagtaatattgagtaatatcgttcccttttctcctacgcatacatgcatacatatcatccacaaaaatttattgtaaaggttggtgtttacattttcatttaacatggtcactttttccaatgataaataagcaagggaacattttgcgtaaatatttagcctcattatttcctgaagacagacaggaggaaatgccgggcaggtggcaaggctgtcagccgtgccagcctagtgtccagctcgctgcagcgggagggagcctcgagcagcgggacacaacgggccggagggtcacgggcgccggcgcggccactccgcggagggaggagggagactgtcggtcggcggacccggcctcccccgctttcggctcagctccgcacgggtgcgcgaggttggccgaggcgagagcctccgcccctttaacagggaccctcccctttaaggcgggcgcacgcgcgcacccggccccgcccttcgggggcgcgcgcggcggcggccgcaccggctcccgggagctcacgtgccggcgcggagcgaaggagccgggcgcgcgcgggcgggcggagagaggcgccgggggc

SEQ ID NO: 50167 - DNA, 360 bp, Mus musculus
  source 1..360: mol_type = other DNA
gatgggtccagaccttccgggccccaaaagctgaggaagccatagacttagggttcttactctacagcttgccatgaatttttttctagaacaaaataattattgaataaataaaaacaagtaaaataagattttagttcttggaggaagtctcatagaaggggaccctcttcctccagaagcagactaacctctccggtcagtacagagagacccctttgtttttcaacccgattttcataaaatgcaagttctcaacaagctgttcatagggaagggctacccattctttctgaagactcaggttctctcaggcacttagggcagagggcgggtgcggcccgcatccttcctgccctg

SEQ ID NO: 50168 - DNA, 461 bp, Mus musculus
  source 1..461: mol_type = other DNA
tctgaatctatttataaaatggggaagagttggcaagagtttggaaagatttctcaggctccaccctgaaattcggcaatttctcaactagggacccagcctggcaaagctatgccctttgggaaggaaccttgaaggccagagtgcctgtcctcagtcctggggctagagaccctgcacattgccaaggctgaggcacgggcccagccctccagcaccaggagcagctggagttatttcggaccccgggacccgatcccgggtccggcttggtgagcctagtggctactatatttagccggcgcagcgggcgctcccttcaatggaaccccgcgtgcgtcacgcgcgcagggccgcctcccgccggaaccgcgccgccccccgcgcccttgtatggccaaagctcgccgggccgtgtgcgtcagtggcgcccccgcccctctccatgcgtcacggagcgc

SEQ ID NO: 50169 - DNA, 467 bp, Mus musculus
  source 1..467: mol_type = other DNA
ccctggctgtgtgacaggtacccagctggcagtggctgtgtagacaccaagacagtgatgtgtttctcggtaaagaggacttcttggacaatgtctgccctgaaggaagactttccaccattcggactgtcctgtgtgtgagaattgtttcaggaacagaaagctgtctgtcccgtgctttgctcagagtggtagctgggcagtcatgatgaccaccttttcgagaccagcctggtctacagagtgagttccaggaccgccagggctacactgagaatgctctgaaagccccgaggatgcagaatcttggccttaacgggccttttagcgcctaaggatccagcctgtcagagaaggacctcgaggccactctggaggagtctgtctaggaggggcctgagcgctgctctgcacgcacttgtagagtgggcggtagggccctgggaggcccgccccttagagacttc

SEQ ID NO: 50170 - DNA, 439 bp, Mus musculus
  source 1..439: mol_type = other DNA
cgagaggaacacttcatttatatttatagggcgccttatagatcacaaaagtatcgcttgtgattcctcacagtagctcccgtcatgacacaacatcaggtagtctatgaaggtaactcagggagactaagctcccttttcaaaactgtgggtctgagttcagtgaacccggactgttgtgcactttgggccaccgaatgggggcccccacaatgggtcgcaggggagggctctccgccgccgactccgcctggccaccaggggcagcgcagagtccatccgtcccctctgtccagtgagttgtcccagcccaaacaacgttctcggtggtgggagtgaatgccttggctgcagcggcgtccggctgggtcgagccgagcctggccagcacccgccgtgggcgcggatggttccttccggttccaccctccgaacttcc

SEQ ID NO: 50171 - DNA, 307 bp, Mus musculus
  source 1..307: mol_type = other DNA
accagattttccatgaagaaggtgcagaccctcttggcccctggagcgggggggggggggggactctgaacccaggccagctgtttggagtggatcttaagcccatttttcagatgagggtaaaatagtttcaaaaccaagagctctaggcctcggtcatgtgcttcctgcaggccttgagtcagtggggtgcactcggctggtcctccatggcgcccagggcagtcatcacccttggagctcaggctgtggctggcgaggccccctcctcagtcaggcccctcttgcaggggactgtgacaagccc

SEQ ID NO: 50172 - DNA, 282 bp, Mus musculus
  source 1..282: mol_type = other DNA
ctattatcctattatcagcagctcttctgttattactactattattgttgttattattattattattggtcttgtcatcgtgcgagcacccaaggccagggcttcctagccttcagggtggagaaccagtgacccagtgagtcccaatagcgcgacacgagggtcccgcccgatgcccacagtgcccagccccggagctgaccaggcgcttcgtggcaccataaagccagggcccgggctgcttgggcggcgggcgcgctccctcctgcacgatataaggct

SEQ ID NO: 50173 - DNA, 368 bp, Mus musculus
  source 1..368: mol_type = other DNA
tcactgcatggagccaaagtccaggagcactccgaggagcactgagcacaccaccacgggttaggacacacacatgtgcatacaaatgtgttcagttgtgaatccagacactcacactagtgtgttaggggtggcgcagttactgaaacagctcttcccagtaaggtcgtcacagggccaggttactcaagaactgagctgagctctccagctgggccaggaaggagagtcctaggaagcctagggcttccccagccagtggagtttgcacgacggcgtctcggcctcctgcagacacttcccgagtggacgaagagccttggctgcagagaaaggtggccagcggccagccccgccctgtccccacc

SEQ ID NO: 50174 - DNA, 303 bp, Mus musculus
  source 1..303: mol_type = other DNA
cgctggctcttttttgaccagtcaaaaaaccaactgttggacatggggattcccctataactatttttaaatgttaccagtggaaatgtaattaaaacgagtttggaaaataattccctatcactttgtgaaattgtatatgtatgaatgtcttgcgggcatgtatatctgtgtgctgtccatgcacgctgtgcccacagacatgtgccctgggactgtagttactggtggttacaagccacagtgtgggtactgggaactgaacccaggttcctaaggaggaagccttccctgctcattctc

SEQ ID NO: 50175 - DNA, 448 bp, Mus musculus
  source 1..448: mol_type = other DNA
ctgttgatttccatgtatatgtatatgtatatgtgtatgtgtatgtgtatgtgtatgtgtatgtgtatgtgtaatgtatatgtatatgtatatgtatatgtatatgtatatgtatatgtatatgtatatgtatatgtatatgtatatgtatatgatgtatatgtatatatactacctgtatttttaagaaatgtatgactcaagaccccgagtaaagactatatgccacacattctgtaagctttgacagagaggtcctggaccaagccaaccattggggttgattacccagtcttgcttgggtaccgaagctgaagcctcagagtgcgcatgcccaacctcaggcactttgaagatgcagcatgctgagcgcctcaggcacctgctgagcgccccaggcacctgctggcacgccttacaaagaggagggtgcgggccactccacgct

SEQ ID NO: 50176 - DNA, 234 bp, Mus musculus
  source 1..234: mol_type = other DNA
agtatcagaggctcgactgacagttggagacttcatgatcttttcatgtcacctactggattttacatactgagtcaaatactgtgtagatagaccttagatactcagtttctggggcaggcctcagggaagatggaaggaagacattcccttggtcctagatccacagatgtgtgtgtgtcaaacagagacatgtagcctgggctgtgtcaggacctcggacagcggtgccgc

SEQ ID NO: 50177 - DNA, 384 bp, Mus musculus
  source 1..384: mol_type = other DNA
tctggagagcttgttctcatggtccagatcctatcagcaatgacctgcggttcttaacggtaaccatttactttacaattcataactatagcagaattatagttatgaagtacctgcactgggaacccagaacacagctcaccccatcctggacaggctctgtgaaagaagggcctgcctcatctccctgccttttagatagggagagacaaggggagggaggtagggacatactccctcacagaaagccaggccagatagccaggctcatagcccaggtgtgaacagagaaccaagaaattcccttgcccttctctaccagagaccaagggaggggcagagtgccaagccaataaaacacagctattgtctcttcttgtgcta

SEQ ID NO: 50178 - DNA, 206 bp, Mus musculus
  source 1..206: mol_type = other DNA
atcaccatctgctggggggctgatgacagtgcagacttcacactggcatgcacagagtgtaggagaaggtgtcatttcctcccctcttcctgcagcctgtctggatgatgggggcttccaatgcagaaccacgacgtctcagggaagcttccataaacaaggaaggaagctcataaacctgatttagtagtgattaggggtttgaa

SEQ ID NO: 50179 - DNA, 425 bp, Mus musculus
  source 1..425: mol_type = other DNA
gaagtcctacagatctgtgattgctaacagtgatctccgccagcttagagctttctgttttgaatccaggtacttagtgctttgtttctgtaacctagtcaaagaatcaaaaatcagctccgggatatacctgaggttgagggaggggctcatagtacggctgtagattcagcccttgtgtaaacagctgaaccctgaagggtagacagaatgctaagggtcatctgagcgttgactctatctgcagagatgcctcaagcagctttcaaacagagcatttatgagcaaagcaaattaatgtccccataatggcaattgcggtggacttatggggaaaaataagactttaatatttatgtgtttatgtgttaaatgccttcaaatggctttttttcgtttttatgaggccaatcctcatgtccaca

SEQ ID NO: 50180 - DNA, 398 bp, Mus musculus
  source 1..398: mol_type = other DNA
cccctcccctcaggacctagggggatgatgggactactgataggagctgccaatcgcaaataattgcctggccatgtgacctgtgtgacaatggttggaaggtaaactgttagagtttgtaaaatgttggcaatgatctgccatccattttcataaagttacaaaataaaatgtaatgtttgtggtagacctacctcatgatgtggcacagactcgactctcaagtaaatggatttttaaaatacgtatgtaagtgaccaaaagaacctgggcaagtgagagctctggacccaggtgtgcctcaggctggacttcccaggcctggtcctgcccagggtagggtgttccccaccatgccattggggtgaacacaacacagtggtctttgatctactctg

SEQ ID NO: 50181 - DNA, 433 bp, Mus musculus
  source 1..433: mol_type = other DNA
aaaaggatgaacatgtggccagtcattcatgaatacctgtcttatctgcatcctctgcatttatatggctgaagcactgtgaaagcagttttcatatgcgaataccactgcccagtgcactactggaccagccactggaggggttggaatccaaacccaagtgtttctgttcccactcctgtccacagacgacagagtacagacatggcatccatgtgtgtgcatatcgacacaagttggagcaaaattaaagggccattcatgttgtgtgccttataggctggagaacgcttgtgttgagcaattaagtttattctcactggtctcaaaccaaccaaccggtggcttttttttggcagatgcctaggggatgccatcagcaggggccccttcattaatcaagctccgccctttgggggaggcccataaaagt

SEQ ID NO: 50182 - DNA, 670 bp, Mus musculus
  source 1..670: mol_type = other DNA
taggagaattaaaacttatattgaactgtttaagatatatgacctaaataaaacaaggatgaaatatatttacaaatttgaacaacaccattttaaagttactaatgctaactgttgttacatgtatttggtttttatttaaatgtataggaatattttcatgaaggtaagtactgatgccttcagagatcaaaagcagaagtaatggatatgcgttctgggaactaaactcaagtcttctgtgagagtaaactttgcttctttgcagtcccttaaagattattttaaggtatatgaatatgtatgtgagaattttaatacataaggccatttctacatatgtgcaaaacagatctactgagtgaattgaaagaggaaagaaaaggctagctgcgagctgcttgtcttaaaactggtcacacaggtatgggacaaatgtgtggttgacttttccatgtgttggaaataagctctaaaggaaaacatgttatatttctgcataggatgatagtgggtctccagtatctccatattcagcaggacatgcaaaatctttgtagagttggtgactaactctgagttacagtgaatgcagaacttactatattcagaaatctgaatatttcataacattttaaaataatctagatgtgatatcactgtttgtaaa

SEQ ID NO: 50183 - DNA, 529 bp, Mus musculus
  source 1..529: mol_type = other DNA
tcagtgctaactgttatagaaaaattggttatttctgtttacacttttgtttttagtttatgcataggagtatttccatgaaggtaagtacatgtaccacagctgtctttggtgccctcagaggtcaggaagctacagagccttcaacaatattttaaaggtaactgaatatatattttaaggcataaggtcgtttctacacatataaaaacagcctaactttagatgtaatattgaattatatactgaaagcaaaaggcttgccgtgagcggtttgtcttaaaacacaggtgtgggacaaatgtgtggctgacttttccttctcttggaaatggtatttaaaggaaaacaggttatatttcatattcctaaccacaggtcagcgatggtctttctgtgggcacagaacaacagtgggtctgcaagttggtgactaactcttgagatactgtgagtgaattactgatttactgatcaagtcaatgcaacctgaatatttcataacattttcaagtaatctaggtgtgac

SEQ ID NO: 50184 - DNA, 430 bp, Mus musculus
  source 1..430: mol_type = other DNA
aaaagcctgggaacctgtggtcctgattatttggggttctaaggtttaagtgccaaggaaacatcttaactttactcaagaatcagactgggctggggcagagcacctgcggaggtcaggtgctgtctgcctctgtcctcagggaagtcagacacagacaatgttagtcttacagtggaaaaaaatcaactgctctcctctgaccttagaggggagggttatataggcatcgagcccctcctggccatctgcaggcaatttccaattatcacagatcagctccttgtctcttttgtttgagaagatgactaactcatgacttaagagaatttacgtcctggctcattgtgttcagatcaagtcaaggctggaaggcaatttgctccgtgactaaaggaatccaaaagcaatcttcatgtatcataccttt

SEQ ID NO: 50185 - DNA, 332 bp, Mus musculus
  source 1..332: mol_type = other DNA
caagacttttttgtaaaggattacatgggatccctggcttaacactcaagctcctctctctctggaatatacccaagaaaagagggccaagagctcaggtctctgctgagaagaacaggtcattgtcaagtgggtgacctgctctgcccacagttggacagaacatgaaccagactgatcatgtcactgattcttgctaatgttcgctaggacagtggccagagacaaatagcccttatttattcctaactgagcagagcctgctgggagcagcatttacaccccacaccactgtgcaggtgtgctgggtgagctcacagctgccccccagg

SEQ ID NO: 50186 - DNA, 314 bp, Mus musculus
  source 1..314: mol_type = other DNA
ctgagatctcaaaagaaaactgagcagtttctgaaatttagctaggatgtgttctaaccaagctagacatcctgcctgagctctcaggacagacagacagcacctgagaagtttctcactgttgagagagcagtggggtcaaactgacacgacctagctagatctgtgaggacagagccatagtgtttggaggacctccccaccgtgccttgtcgcaggcatattccactttctattaaaagggctctgttgctcaaaggcttggagatctatgctctgcaaattgctcgtccttcaggggtggggataaaagg

SEQ ID NO: 50187 - DNA, 207 bp, Mus musculus
  source 1..207: mol_type = other DNA
taataatatgccctctgatgggctcactggaagccatgtcagtagcccccaggtgtctttcaaagtcatccccaacataccaaggcttgttctgcatgccggtttccagcaggacttaaggggcgagctgcgccaggagtgcagctgtatccgtgccccaggcctgcctgctgccgtcctgccagtccttgcccgctgccagccatg

SEQ ID NO: 50188 - DNA, 399 bp, Mus musculus
  source 1..399: mol_type = other DNA
cagatgaacatggcagggtctacctctggaaagtgtgataagcacatgtcatttagcccacagtcgttgtgacacaggtcccatgataaaaatagggtcctgtcatcctggtaccccaaaaggagagacccacttgcttatatctgcaggaggcctggtgagaaagtctgctggagaatggcctccctcaaaggtctctgacaagaaaaatctgggttagggctctatctggatatagcttcccctttctaggacaggggatagtacatagtggcctgctctgtccaaaatcattcccctgaggaggctgtggcctggggcaaattaccttataacagcgggttaattagataaagcaatttaacagtttcatgttgtttcagaggtctctggctcagc

SEQ ID NO: 50189 - DNA, 283 bp, Mus musculus
  source 1..283: mol_type = other DNA
actggctgtggccatgacaacaggacattctgctatcagaatgtatccttcctcagagatctagaccaatagttctgcgatatggacactggtgtcaaccactgggacctatctgagtcctgagaaatgttttcagcagccttgggaaacgggagatttctcagagatgacactatcaattagaagtctccttttcctagccaagattagctaccgcaagcccagatttcgatagaagaaaatgatttcttccttccgagcaattgttctcttgagctctata

SEQ ID NO: 50190 - DNA, 429 bp, Mus musculus
  source 1..429: mol_type = other DNA
tttcccaagctcaccggtctttgaaagtcagtgaagagcctgccttcttaatgccttcagaatcacaaggcagtgcatggtttctgagccttcaggaaagaactcttccctttgttctttgaacccccaatggaattgatggtgataaatcctggtgacaggactcaatatgatcccctccccagggggctgcaacattgcagcgtggaggccccccttcctgggccacatggaggcaagagagctggaagtttggagtgaatgctctcagagtatcaagccagacctccgttccctggcaagctagatgggaagcccacacaggcctgggtggtggccagcttcccatgggtcggtccattttttttccaagttgggaaacccaaagactaatctgatgattttacaacaaagcaggttctggattat

SEQ ID NO: 50191 - DNA, 275 bp, Mus musculus
  source 1..275: mol_type = other DNA
agcgtgaggtgaggtttgaatctgcactttttataatggcatttgcaagctgcctattttcaactgatgcctgctgttcctcatttgaagaggaacaagcaggaataatcgatcagcgaaaattctagaaaacattggataaaggaaatccctcctttagggattagcccatgagctggactttctcaaagtcacagacactctgaagagagatcctgtctgataaattgtatggctgcaggcgagccaaaccctttgcaggctttgcataaggg

SEQ ID NO: 50192 - DNA, 431 bp, Mus musculus
  source 1..431: mol_type = other DNA
tagctatttgtgtccaagtgcaaacacacacttctgttggacaattcctttcctactactcaaggtgagagtaatgctttaagaactcactattattgttactgtctctgccaggagaaaaattttatgctgaccaaataataatactaaatccaaattaaggcttgtgtttcacatttatgtatttcttaaaagatagctactttttctttttacaaaaatattgtcggtgaatattagaatagaagaagacatatgggagtagttctcctctgagtctaggagactggattttatgtacgaggacagccttgttacaatttgaatcctgagagattgctatcctttggtctctccgtagtctggcaggcaaatactcccctcccagggttcggaaagtttccagcccagcaggtgtgtgtatatatagg

SEQ ID NO: 50193 - DNA, 359 bp, Mus musculus
  source 1..359: mol_type = other DNA
attaagatgaaaacacattcttataatatttctgtgtttcttaaagaagccaaagtgtcaaaattgtcactacagtagtgaagtaggaaccacctgccattaggatggtgggggcagatctactctgagacctccctcaggatacagaggtagcagactggatcccatgtcaatgcattcggagtgccacaggacctaaattgttcaatgaatttaggcctgggattcagttccctggaagaggttgaccagttctaatggcccttgtcatggagatcaagggcccctaatcccttagggtctagagccagagaaagcaaagcttgttgcctgtgtcaggcagcctgggatataaaggc

SEQ ID NO: 50194 - DNA, 365 bp, Mus musculus
  source 1..365: mol_type = other DNA
gagaaatccaagttctgggagtaaaactatgattttgtatctcgcacatcaagaatgttaggaatctctttccagaattctgggacttgtttcacagcttgaagctcccatccaagatcacaatctcttttgtattgaaaggaaaagtaaatatttgcattctttccaatttagctgagctcagggagcagcttgcacacacaggtcagggtgcatagcctggcaatggcaggctgtgccctagaacccaggctctcaggttccagggtctgttgatacaggaggccctggggcactggctcagcgagggatgagaccgtaagctgtgccctcccaaaggctgctgctccagcgcatataagcca

SEQ ID NO: 50195 - DNA, 363 bp, Mus musculus
  source 1..363: mol_type = other DNA
taagctttgacaccctcccaccttcacccctagggtgctgggatataggtgtgccagcccacattgtgtgctcagccaggcctatggctgggcagggacccagacagaagagtagctgctccatggacctgccaagagacaggaggctgtgggctgggagggtgggactggagcaggcctgggcaccctctctacagccacctgcacagcactgggccctggggccttggcttaccacaaggccctgggacaacatcagggccactgggtggtggccctatctgctcaggagcagtgatggctgggcgaggccctcccacatcctgggggagaggagattccccccccccccggacagctgga

SEQ ID NO: 50196 - DNA, 228 bp, Mus musculus
  source 1..228: mol_type = other DNA
ttccccgggagtagctggaccacctgcaggatgaggagaccctgcctcaggctggaggttggtccctgctagaccagggatgggatccatcctgggagaatcccagacagtggctgccactcatttatccactggctgccagcctggctgttcaggtgcacgtgtgtgtcagagcaggtcagccgcagcaagtggcagacacagtcagactgagaacatcttgctctc

SEQ ID NO: 50197 - DNA, 422 bp, Mus musculus
  source 1..422: mol_type = other DNA
tttgatttctctttaccttgcacaagagagaatttgccagcctatgggtgcaggatgctaaagggccctgctggtcagcctggccagctccacctaaaggaggtctcttggaggtattaaggccggtgccggcttatacccccaaaggggttgtgacgatatttgatatgtcacctctgggaaaacatagctctatccctagagggattgcaacccactggtgagacccagtgttttaaactaaaatgcctgggaaccctttcagcccaagtagagagatcccaggctcgatcccgggtgggaacagctctctgctgccctcacctgagtcccgtctggaggttgcagacgtgtaggccctgccctctagtgtctagccactcaggtaagaggcccttttccctcccctggggcataaaggg

SEQ ID NO: 50198 - DNA, 371 bp, Mus musculus
  source 1..371: mol_type = other DNA
atgcctgggatcccagcaacatgtgtacccacgcgtttgaggatatgtatttccaccctatggagccacagcagtgtctagaaaaaccaagagacctgccctcaggttcgtgtttctctggattcctggggttctaggactgcccctggctgtcctggaactcactctgtagcccaggctggcctcgaactcagtcgcctgcctctgcctcccaagtgctgggataaaggcgaataaacggatatttaaaacgccattttttgccactcaggggctaacaccaggtcacaggaatcccgatcctggcgcccccggctccggtggctggggcgtggcctgctgggggaggtccctacctcctcccgcggcga

SEQ ID NO: 50199 - DNA, 352 bp, Mus musculus
  source 1..352: mol_type = other DNA
agagtagtcagtgctcttaatgttttagggtcataaaaaaattttaggaagggccatctggagaacttttgttaaacgttcaatagtttcactttttgaaatatatatttttaaaaaaaatgaagcattaaatgttaccttccattatattttctttgtctttacaaaaagtgatttaaaaagaaactcagagtgcgccaggagactccgccccgggcgcagatcggaccggacggccgcgccgggcccgacgtaaagcgaagggtttcgcgacagctcagacgcggcgccaccccctcgcgctgctttacgaacccagcgcggcggcggcgccccgccttctgcctccgtc

SEQ ID NO: 50200 - DNA, 411 bp, Mus musculus
  source 1..411: mol_type = other DNA
agctagctacagcattccaaaggctgctgtctagagcttgggctgggaacccccagaggaaggttgttccatcctttccaagggtccttccactcctgggacaggaagttgagggggcctcctgtccagtcctcgggggggtccccagtagaacctcaggtgcaggagggtactataagatccttctcccgtctgacagggaagttagccctcatcccggtactggttcccagcaacactcccttccggagcctggccggggacacagtgttctccactgccactggctgattccagggctggatctcaggactgcagaccccctgcacacagtggcccactgggtggggagagccagagatcttaggctgacactcccagcagggtagatcctgggaatctgatctcctg

SEQ ID NO: 50201 - DNA, 322 bp, Mus musculus
  source 1..322: mol_type = other DNA
gtgcccttaactgctgaggcaactctcataaggacatttaatagggtgctagtagaagactcccttccaggaagctaggagtagggtcttaaagcccactacgcccttggctccctcaggtaacctgctaccacaagggtggccaggggacagaccggaccctcgtgttccattcatgtaaggggacgccagcggggcgtggctcctcacctccagggggaagggcagtcccctactcagtgccccggtggccttccacaggcaacaccccacggaatgatccctctgtctccgtggattacaacacgacagagcctgctgt

SEQ ID NO: 50202 - DNA, 188 bp, Mus musculus
  source 1..188: mol_type = other DNA
tggtactgaaattctccgaccagttccttcccaaatcttgggcacagatcagcctggagagtgaggcccagtctgtggccagaccacccagctcagctccggggcacgggtggacccaggtgggtggccctccagtccacccacctggcttttaaggggccgggcccagacctctgcttcttaaagag

SEQ ID NO: 50203 - DNA, 509 bp, Mus musculus
  source 1..509: mol_type = other DNA
gtaatctgtgacccaagagttagtaattaatattaaagtaaaagttcataagggcccattatcaatgtaaatcaggtctaattggcaaattgccgccaatgagctgatgtatttgatactcaataaatttagatgtggaaagacacaaatatgttcgtttatgtttctgacacaggatgagtctttctggaaagaatattcagtcttaagagcaaaatcataccctttataggaggtgcatgataaagattagggtggaacgcctgtcctggagctcaaaaggacattccagagaggtttttagccccaagggagccgccccttgaccgcctccctgagctccaggcgtccgaggtggcgtccgggcagccacgtcgcctcccccaccctcccgacaccagggttcctcagacgccgccgagtgttaggtacccagctcaccgggccgcgctccgcaccgcctgtgccctgcgattggctgctgagggcgcccatcttcaagaagcgct

SEQ ID NO: 50204 - DNA, 234 bp, Mus musculus
  source 1..234: mol_type = other DNA
ctcttccattgcccttggaatacagtagactgccactgccacaggtgggactgactgagatcctggcctcagtccgagatcacagtgattacaatcttgcttctatcactgggaggaggaggattaatagttaatccccagcaggaatcccataattttttttttttttcagaagaagcttaaaaagtttggtccgaaggtccctccctgaccttagagtatgagaaacactgc

SEQ ID NO: 50205 - DNA, 268 bp, Mus musculus
  source 1..268: mol_type = other DNA
caggtctccccagacttcagcctcctgggaccacctagggtcagggtctaccaggccctggactggtccagcagagcagggctatgtcttcctagcctggatggtgcaaagccttgggtccgagtcccagaatgagccactgggcatagtggctcaggataccaatcaggttggaggccagcttggaatacatgcctgagttcgaggccagcctggagccagggctagtgggagctccctgaggcaagtgtgccacctgcttctcgtg

SEQ ID NO: 50206 - DNA, 428 bp, Mus musculus
  source 1..428: mol_type = other DNA
tcagtttcagaatgaccctaagggaaatggatagtgtcttactgtcacttaaactcaccaactgggacttaagtggaattcacgtttccttgtgtgcacttagaatagtcctatcttttagcagaactcctctctaatgctacaagtggggcgctagtagggcctggcccgaaaaaaggccttttcttgaaaggaagcctctcactgagactcacatgcagattgttgtgtgcctcagtctgcaggtctgcgcttctacccgaaccttctcaaagaacactcagtacctaaaggttccctaaaggttccaggcgagcctgggagctgccctcagtgaagatggcggccggggcgctcgcgcgccacggcgcaggcgccgcccttcgcgggccccccctcctgtcccggctccggagcccggaagtgga

SEQ ID NO: 50207 - DNA, 469 bp, Mus musculus
  source 1..469: mol_type = other DNA
aactgggacttaagtggaattcacgtttccttgtgtgcacttagaatagtcctatcttttagcagaactcctctctaatgctacaagtggggcgctagtagggcctggcccgaaaaaaggccttttcttgaaaggaagcctctcactgagactcacatgcagattgttgtgtgcctcagtctgcaggtctgcgcttctacccgaaccttctcaaagaacactcagtacctaaaggttccctaaaggttccaggcgagcctgggagctgccctcagtgaagatggcggccggggcgctcgcgcgccacggcgcaggcgccgcccttcgcgggccccccctcctgtcccggctccggagcccggaagtggagggcccctgcctcggtcccgacgcggggagcggcggccgcgggcttggcacggggtgcctggggcctggagggggcgccgcgcggcggaggagacggcgg

SEQ ID NO: 50208 - DNA, 212 bp, Mus musculus
  source 1..212: mol_type = other DNA
ctcaggcaggttggcttcagagtccaaatagcttagcttgattcaatccaggttataattagttaaatttattgatactggttagagtctgccaaaactgggaacttattttcctggcaaatcaaaggaacagacttgctccttcctctctgtgatactggagagaggtgggggcaccgccactatgcagtgcttagtagatccagggtgtg

SEQ ID NO: 50209 - DNA, 420 bp, Mus musculus
  source 1..420: mol_type = other DNA
gggggactccgctgcggagctggcgacggccagggcggggtggggcggggccgggtcaggaggaggtgagcgcgcccggccacccgccccgaggggggttcccggagagttcaccgcgggagcgcgctctggcccttggtcagctctgaagcgcgtgcgcgcgcgcgcactcgaaggaagcgggtctggagagctgcgtagcgcaaggcatctcaaggctccccaaggaaatgcgcatattttatcacgcgcttaagtgcaagagagcttgattgcaagcatttttcctgagccaggtgtatttgcacaaattcttgcacctatgaatatatgtgcgtgcagatatgcgtgtgcactattgcacgtttgcaaatttccaagataaatgcttgcacagatgtatgtctgagcaagcgcgtg

SEQ ID NO: 50210 - DNA, 353 bp, Mus musculus
  source 1..353: mol_type = other DNA
cgcatctaccaggcagccaggcaggcctcgctggctgagccagacacacaccctcgcctcacgcgctttaactcctggagtcaacttcacctgcactaagaaaaggggacagtgccttctcctctgaagtctctcactgcctaccctgggaggtaccagagaccggcctgggagcccaggacactgacctctgccagctctgcccggcctcccggggatggagccacggaagccggaggggcagagacccaggcgtcctgggccgccccgcccagtcccaccaccccccccagccccagggcaccgaggagggagccgggcagggagggagaaaaagaaagaaaatattttcc

SEQ ID NO: 50211 - DNA, 298 bp, Mus musculus
  source 1..298: mol_type = other DNA
atttatttatttatttatttatttatttatttatttatttatttatttgctcaaggagccagcctggtctacaaagtgagttccaggacagccagggctatatcccggacagatgcatttgcatgtcttttgaaagaattgaatactgaaagtccagctccctggacaatactgactgctggccgggctggctctgaggcacctttccttctcctcctggaggaaaacagaaaatacggctccagcatcccgggccccataggctcttccgctcctgggcggggcgccacgaggggga

SEQ ID NO: 50212 - DNA, 346 bp, Mus musculus
  source 1..346: mol_type = other DNA
gccagcctggtctacaaagtgagttccaggacagccagggctatatcccggacagatgcatttgcatgtcttttgaaagaattgaatactgaaagtccagctccctggacaatactgactgctggccgggctggctctgaggcacctttccttctcctcctggaggaaaacagaaaatacggctccagcatcccgggccccataggctcttccgctcctgggcggggcgccacgagggggagtggcttcctgccgcgccccgtcacgtgacggggctatcatggcggcggccacgagccagcccggctcccggaagcaggctgtgaggggcgggcgcgctgctgga

SEQ ID NO: 50213 - DNA, 284 bp, Mus musculus
  source 1..284: mol_type = other DNA
tctctgtgtagcccgctcagtattttgaaccctgtttcaaaaaacaaacaaaaacctaggagaacccggaggttgtccctaatcccaaagaccctgtgtggtggtgtacaccttttagaggccagcctgaaaaatacatcaaaggctattacaccttttctttcctagtaacgcaaagcaagccatgtgggtttcttattttaattctcttgaaatttaaaatcctgcctgagagactgtgtcccagagtctttccggtccacgcggccggcctgcgttacgct

SEQ ID NO: 50214 - DNA, 324 bp, Mus musculus
  source 1..324: mol_type = other DNA
tttgcctgcatatatactgagacataaaaataaatttaaagcgcgtacgcgcagtagcttagctttacaaggattgacccacttaccaccattgtgaagaggtaatccaatttccccatggtaatcagcctgttggtttaagggcattagaagcccaaaattgagcttccagttcaatggaactagccaaaacttctaggccagcagaacctagagttatggttagtgtactctgagaaaagaaaaacttgcgttctctaattaagcttgaggagcgtatcccctggcggcaccacggaggtaacgcggagggcggctagagcg

SEQ ID NO: 50215 - DNA, 253 bp, Mus musculus
  source 1..253: mol_type = other DNA
gcgtggtggcacgcacgccaaatagcctagattctatagccagtctttagcatactgacaaccctgtagactctaagtctgtgtgtttgttgtcatggaaatgatgagccagcagctcacagccctgggggcagcgcaggccacggtccactgagagtgagggacccttcttcaaggggcctgggactttttccggcaatggcctcctgggaaagtggctttgccaagagccccgtgcctgacacttcctctt

SEQ ID NO: 50216 - DNA, 256 bp, Mus musculus
  source 1..256: mol_type = other DNA
ttctggtgtgtctgaaaaccatgagagtgtactcatataaatatggacattcagtgatcctcctgcctaggcattacagccttgggccaatatgccccacgtagttcaacggttccaattaggtactttcctaaacctggctccgtactaagtaacacaggtcggtcctcggacgtgtcagcgtcgtgcccgctccgtacgcaagggggcgcgccaggaagtcccggaagtccgtcccgaaacccgactcggaagg

SEQ ID NO: 50217 - DNA, 247 bp, Mus musculus
  source 1..247: mol_type = other DNA
aagcttttgtacatactagccaaggattctaacctacagggggtaccaggaggtcctgtttatttatttatttatttatttatttatttatttatttatttatttatgagacaatgactcataactgagtgggatgggaaggtgcagatcgaccccatgcactacgccttgggaacactgtgtccgtcgcggggagtcccgaccttagggacatgtagctcccacaccactttctgtggagaaggtg

SEQ ID NO: 50218 - DNA, 268 bp, Mus musculus
  source 1..268: mol_type = other DNA
gtctccatcaccatcatagtgaatccccccccccagatctctaattagtggtttggggttcagcagcgcggcagcagcggcggcagcctcggtggtagcagcagcagcagcagcagcagcagcagcagcagcagcagcagcagcaacagaagctgccgcgccgctgagtagcagcaaggactccgagtcaacaggacagacactgggcagttctgggggactgcccacagatgcggggtatgttctttggggagctcagcaaatggag

SEQ ID NO: 50219 - DNA, 312 bp, Mus musculus
  source 1..312: mol_type = other DNA
gtcgtcccgcccgccgccgcagggcttccacccacggccagggggagccgcccgcccatcccggcaggggtgacgggcgacgcgacactctcgccctcacgcgtctcgcttgtggagggctccactcaaccattcaaagctagaggcggtgccatgctgccttcgctgcctcattggcttgagtatcggaggaggaagcctgttctcctctccccccaggcatgcccaggataccattgggtaggcagcccgcctttcctctgcaaggccctcctttcaccctccctcattgggcggggcagtagataaggg

SEQ ID NO: 50220 - DNA, 394 bp, Mus musculus
  source 1..394: mol_type = other DNA
atgcatgcccggtacccattgaaccaaacctggttcctctgaaaattttcatatcctttctgattttttgagtttgaaaaatgagatcagcaggcagttctgagttcgaggccagcctggtctacagagtgagttccagtacagccaggactacacagagaaagaaaaaaaaatgagatcaactttagttgatctgtgagtctctacagatctgagttctccatccatgggaaccatcttggaagagctccctaaatgtttgacatctttctgaaaaagggcagaaggtccagcaccttcttccccaaggtcccttcctcccctctccgaggagaaaaagaggaggtagctgaagaaaagattgattctctgctcctcctggggattgaaggct

SEQ ID NO: 50221 - DNA, 506 bp, Mus musculus
  source 1..506: mol_type = other DNA
tttttttttttttttaaggagcaacaggcaacaataaagcagcgttgctctacagtccaaggtggcctgaggttcacctttgtcatccttaagttcgttcctataaatggataattagacttaataaaaagattaaccaatttgggcaggaattctagattatacagtacttcttatataatagtgagatattcacatgatcaatgttgtcctaatacagtgaagttttaaagttacttttctttcacgtagaccagggtggactcgaactcagagtctttattataattattattgcctgattcagtatctgggctgcaaaataatgatgttcactaaagtggattatttttagagtaagcagtttgcagcattggggagccgctctaggctccgggaaggcggtccgcattgcgtggggaaagtgtggacgacgcagtcgactcgccggcccccggggcggttagcgcttccggggtcgaagggtgcgcggggttgaaagcggc

SEQ ID NO: 50222 - DNA, 443 bp, Mus musculus
  source 1..443: mol_type = other DNA
attctagattatacagtacttcttatataatagtgagatattcacatgatcaatgttgtcctaatacagtgaagttttaaagttacttttctttcacgtagaccagggtggactcgaactcagagtctttattataattattattgcctgattcagtatctgggctgcaaaataatgatgttcactaaagtggattatttttagagtaagcagtttgcagcattggggagccgctctaggctccgggaaggcggtccgcattgcgtggggaaagtgtggacgacgcagtcgactcgccggcccccggggcggttagcgcttccggggtcgaagggtgcgcggggttgaaagcggcccgctccgccccgtccccctcccagaccagcagaggcagcagccggagcagccgcagcctgcgccctctcccgccgctagcggggccc

SEQ ID NO: 50223 - DNA, 301 bp, Mus musculus
  source 1..301: mol_type = other DNA
cttttcatccaaagtcatctcttatctttctacaaaaaaagaaccacaggctgtggttctagcagctggcaacattgaagcccagggctgggtcagagacagggctggtctgtgtggctctggcagggactaaaggtgtccatcatgacagagctctcttaaaatttaaaaaacagtgagagtttatctcgttggcccttgcttggagctgaccccgcctcggtcccgcctggcggccagcgcaacagtcagttctccaatcatcgtgtcaaagtgatcacataattattaactaggtcac

SEQ ID NO: 50224 - DNA, 369 bp, Mus musculus
  source 1..369: mol_type = other DNA
cagggtgaccgaatgtctggggccccggggcttctagtccaccagcttgggttaatgagacacagctggtgggaggattctccagtttaccatggctccctgtggaagatctgatgctggccctggataccacagggccctctggggatgcctgtgtgatctgaggcaggcagagctgcagacctctgaggatgtcatcctctatacacaaaccattttaaaaggcctggtgttataataccgagcccaagtaactgaggtcagccgcatctgcatacgggcagcaaatatagcctgcccaggtcaggggcgggctcctacgcggccccgcccctgcctcgcgttcacgtgaccctgggctaatcttgt

SEQ ID NO: 50225 - DNA, 312 bp, Mus musculus
  source 1..312: mol_type = other DNA
tgtcccgagaatcattagatggaccttctgtgtttagttacctttggctaaacgtgattcaaagagtgttttttaaaatgggtctcagtgccagagcgttgtgtatggatcctacagattccgcatgaggacggagatcgcgccggatggcagccacaggctcctttaagaggccggcgactccagcgcagcatcccccgctcagggcgtgtccgtcccggggggccaggggcgggcacccgtacacctgagttccacacggcatcgccggtgacagctctccaggtccggtggagcgggagcagcatccgg

SEQ ID NO: 50226 - DNA, 320 bp, Mus musculus
  source 1..320: mol_type = other DNA
actagctcctttaaaggacccttccctgaactggaattctgggccccaagtaggcgcctgctctctcacttaactattcacaggtaaatcttaaagggtatcctgatcacccattccaggcaggagtagggaccaatgaattctgacaggagtttcttgaagcttctccaatctgttgaaggattggaggttcttctaaggttcccccagatgatgcttcctgagctccggagacaagatttatgcatctaataaagtctatataactccagcttaatagagccatgcatttccaccccccaggctgccggtgaggtggg

SEQ ID NO: 50227 - DNA, 281 bp, Mus musculus
  source 1..281: mol_type = other DNA
agacccattttaaaaaacactctttgaatcacgtttagccaaaggtaactaaacacagaaggtccatctaatgattctcgggacacgggtctgaggagaactccggacttataaaaccccagagctctggggtgggggtggccaaggagaaggctgcccgcagcggcgcccgaatgacgcgctggcgcctgggttctgtagttctctcagggagacagacgcatgctcacagtgtcggcttggagcttgggaagcttccgccgagggtctgctcctcccgg

SEQ ID NO: 50228 - DNA, 417 bp, Mus musculus
  source 1..417: mol_type = other DNA
taaaaattctgtcagagaaattttccacatgagttggtatttcaataaaatacttgctgggtaacatatacaaattttaaaaaaaaaatcactgtgtcacactgagctacactaacagtcctactttctctctgtaagtgtgtgtgaccagatgacaaccccagaaggctagactggtgtggctgtcctggaattcgctatgtagaccaggctggcctcgaactcacagcttagaggcgggcgccgccgcggtgaggctggagttgaacgtcaccgggcaggggcttcgtgcctgagacactctcggcagcgttagacgccagggccgctctccccgcgctgcccacactttgcagccgaacacgtgcgagtcgtgtgtacagcgctcctaggccctggtccaccccacgagtcgcg

SEQ ID NO: 50229 - DNA, 439 bp, Mus musculus
  source 1..439: mol_type = other DNA
ctcttggaagtacttcttccactatgtgctccaagaatcaaacttgttttatcaggtttatagggcacatggttttaccctctgagccagtgacagtcacttcatatatatatatatatattccctcagataattctgattcaagtggacttctcgtaataccccttaatggagtggtgaaatttttaaagtagaaatcagtattttaaggagtgagatgacttagtcttctgagaactctcccagaagtagcactaggccagtgtgcttcaggtctagggctctagccctaaaaatgaatactagttctttctgtcttgagcctgtacactgtacactgactgcttctaggcccagacactgagacgcaagtcacttacttgcccaggccatgaaagtcacttgatttcaggattctgccgatccttctcaggtgtga

SEQ ID NO: 50230 - DNA, 456 bp, Mus musculus
  source 1..456: mol_type = other DNA
accggacagccgggctaaggggctgggtcagccttgcagccgtctgctaggctcgtgcgttcctgcgtgtacacaaaggcctgctccaggactagcgcaggaaagcccccgcccaccgccactgggggagggacgggcgtggggagagcacctcgcaggcgacctgcaggccacaggtgcgggggagaatcattttcatgctttgctcatcaacgagatagggaaaacaaaagaaactgccatggcattttgctaatagcattgggccagttcccatagggtgacaagaagccaagagttctgtgattttattttcgactcgagtccaagactccctgttggacgccaggtggagtgcttgtcccccaagacaccaccaacctggcagagggagctgtggcgtccctccagaaagcgactcgttggctccggccgcgcatgcgcagagccttccct

SEQ ID NO: 50231 - DNA, 426 bp, Mus musculus
  source 1..426: mol_type = other DNA
gccctgctagcctgggcccctcagagggtggcggttctgcccctgcccaggtcaacaactggcactggaccaaggtttaggaaaggcggggagtcctccaccctcttcttcatccctctgcgccgcattgaaattcctccgcgaggataattaaactcggggcctacattcctcggccggggtgtgcctggctgcggctcgcctcccaaatccgattaaatggaggagcttggggccggggcgccgcggggccgggggccgggaggcggcccctcagagggtggcggaccggacagccgggctaaggggctgggtcagccttgcagccgtctgctaggctcgtgcgttcctgcgtgtacacaaaggcctgctccaggactagcgcaggaaagcccccgcccaccgccactgggggagggacgggcg

SEQ ID NO: 50232 - DNA, 272 bp, Mus musculus
  source 1..272: mol_type = other DNA
acaaccctatagcaacaattgtattgttgctctaattaatttaagccagttaaaaggcttgggcaaacaagcctccagaagccactccagggggagcacgtgcagctttgagacttttacaagctctgtcaaccctgtccccacccacaacatggtggctgtagctcgtttctacaagttttttcttttgtaagtagatataacactacagcctatcttgagaacgcgttaaaagcctgccctttcttaaggaatcatgggccgtgaagtcc

SEQ ID NO: 50233 - DNA, 350 bp, Mus musculus
  source 1..350: mol_type = other DNA
tgctggggctgacagcctcctgtcataaagatgaggagattcttagaagctccctctactgatggaaccttagtggaggctagagatagaatgatcaatccccctctcagcagcgcagcgctggcagggctgagagaactttatatgacacaatatctaatagtaatttattggggagatattgtaaattccaacggttttagttaataaaggaaggttttatatgactttttaaaaaccagaatcctacgatttcgctcccccatctccacccaggattggggaagggggaatgtgggtggggggttcggttgtccccacccctccccctggcggtagcgcccacgtta

SEQ ID NO: 50234 - DNA, 391 bp, Mus musculus
  source 1..391: mol_type = other DNA
gaagtctgcatttgggaaatccaatcgcccaatcatgtctgacgagagagcccttttccagacaaactggggctttggggaaagcctctgaggtcggagtttgagactctggtttcggcaccaaaggctgagctgtcctagctagatttattattattattattactattactattattactaaaattccagctgtttgagaaccggagcctctcagcgtctctcagtccagagcctaggaggaggagccatcctcttctccctcccctaacaaggcttgcctagggggcgcgccccatctcccggggagggaaccccaggagacccaggcttagcatcccgcatgcgtaagggaaaaagagagcgaggtgtctccctagctcgctgcctc

SEQ ID NO: 50235 - DNA, 250 bp, Mus musculus
  source 1..250: mol_type = other DNA
ggagccttgagtggttgtgacccgggcccgggcccactccagacactggacagaaacttcagcttgctttggaaaagagtacctgaatcttgtcttggaccgcccttgcagcccggggggcgcttcctttgttcgccaggaagggctccggtgcccctaccccgaggcagctgctaggtggcgctggctgagcgctccgcctgcctggacgtccaaggctcccccccccttcccggatgggggaaaaaag

SEQ ID NO: 50236 - DNA, 395 bp, Mus musculus
  source 1..395: mol_type = other DNA
tgccccgcttaagttgtgtagctctctcctccacttcttcaggctgaaacagagattcctagatttgggaaactgagctgaccaggggcagaagaacgctgctgctgctgctgctgctcctgaaagaaatacatacatacacagtatttaaaaacgcatttttaaaagccacgttccgaacttgatctccgttcactcagagactgcaggagcgtccccgcccctgaggggctccccgagcccatctcagctctgggggtccaggaaccctggcttctgggatggcgccttgggtccagagttgcaaatcgcgaaaaaaagcccctgcgcattgatccgcgccgtattttaaaaataattacctgccttgattgttctgtgagcagataaaaagt

SEQ ID NO: 50237 - DNA, 423 bp, Mus musculus
  source 1..423: mol_type = other DNA
caaacaggagttgatttctttaaaaagaatctcagtctctgtattattataatgctttctttgaagtaaaaatattataaaagtttccccaaaggaaatttccttttccttttgatttaaaaaaaatattggaaaaaaataaagcccagaatatcttctagaatttctgggaccctcaaatgaagcacccagaatttaattttagatacaatagatgaccacagcacagcaaagttagctggggtggggagaccgctgggaacaaggccctgcccccacccccaaccagttcatatatatgtgtgtggtgtgtatatatacacaccacatacatatattcttaaaagaaatctaagtcttactttcaaagcacatacttagtctcaactagggaatcaacagaagttttcccctttcttcatc

SEQ ID NO: 50238 - DNA, 165 bp, Mus musculus
  source 1..165: mol_type = other DNA
ataggtcatgctgaggcatatagagtgccaccagaggctggagattgtgcaggctgaagggcttctcagagtcctcagacttaaggaacctcagagactacctgttgaggtaacctgagttgacctgagctggccttgtccattagctagggctggctcagagag

SEQ ID NO: 50239 - DNA, 249 bp, Mus musculus
  source 1..249: mol_type = other DNA
ccctccagttcattgtcataggaatgttgcctcttgcaacatgttagggttcctaacattgtgaagtctacctaggactctcagcctcaggatagtttaggtatattcgtttcaaaaaccaccggtgtaattcataaataaggcctaagacgctcaatgggttagtttgtccaacaagcaacactctatttaaggctcccttatttgggagcataggataaagagatatctccacctataaattgtgca

SEQ ID NO: 50240 - DNA, 367 bp, Mus musculus
  source 1..367: mol_type = other DNA
actctatttaaggctcccttatttgggagcataggataaagagatatctccacctataaattgtgcacaaaaagggtgcagaaattttttttgcctatcatgcatgtggactccacggggtagacatggctgccaacccccgggctcaccccgaccgccccgcctgcagcgccgcggccgctccgggacacgctctgggcagagacgaagcggctcctctgcggctcgcccggcgctggaggagcgagctgacagggcagcctgccggactgagccagccaccggccccataggccatgcataaattttacgatccaggcatcaatgtgcgcatataattgagcatggggctccagagtggggatcc

SEQ ID NO: 50241 - DNA, 397 bp, Mus musculus
  source 1..397: mol_type = other DNA
accagactggcaaagttcatcagcactgtctcagccccaggcttgagggggtgggactgtgcctccagcctcaggtttgagccacagctgcagcagttcagcagaggcaagaggcctcagacctccccttcactgggggcggggggaggccagaagcttctgcttggggtctacccggaaaatcatgacttaccttccccggggagtgggaagaggggacagtccttagagaaataagtaagtacataaataaataaggatccaccttctcccccctccccaccctgcaaggaggtgtgggggaggggcaagggcgtgatgtcattaaaccaagttttatggtgtagaatatatttacatcatatataatcttaacgtccagccacgcagctgctgg

SEQ ID NO: 50242 - DNA, 274 bp, Mus musculus
  source 1..274: mol_type = other DNA
tctctgctctgggctctgggctctggggcctgggccgggaagcaagatttctgaaatctgctgggaccctgtctccaaggccccttggccaagagggttggagaggggccaggcccacggggcccactggaggccggagaggagactctgggcgggggctagatcacagcctcccgacagcccccagggagtcgagctgggagccacccatggggtgtgcaatggtgagcaccccagcttcaaaaattggatacattttgaataaagcgattcg

SEQ ID NO: 50243 - DNA, 350 bp, Mus musculus
  source 1..350: mol_type = other DNA
tgcaaatcgcatgcaaatatatgcaagcgagctagtgctgcgggacaggacgctcccgcgtcctctcttctagtgcccagggtgcctggggcttcatcctggcggccactctgcccaagagatgtgaccagaccctgggcaaggagcagaaggtccttgtggcctgtgaaggaggaagtgttccccctccgggaaggctgggcgccacagccagcatagatggcagttaagcctcccagcctcccagatctgctctggacacaatgtctcatacagctgaggatgaccttgagttggtagaacctaggacctggaacctgctaaggcagggctccgctcttacagctaca

SEQ ID NO: 50244 - DNA, 559 bp, Mus musculus
  source 1..559: mol_type = other DNA
ttcttactttaatcatgtaaatatttttcttgtcagcatgtaattaatatgcaatagtcagattgtagtatattgacttaaataaatcatctcaacagttaaattattaacatttttattatggttatataggttaatttttatgaatattgccaaacagtattgggtgaatcaaaatttcctgacttagtttatgctaataacaatgacagagtaaagcctgagcccagcacttgggagtcagaggcaggcaaatttctgagttcgaggccagcctggtctacagagtgagttccaggacagccagggctatacagagaaacccttttaggtagaggaacatttcatttctctcattaattggaactcattatataggccaacttcatcattttatgaggatgatctgctaaagtgtgtataaattcatggtaatttactcatattgttattatttttttcttaagatttatttttgatgaaatcttgacaaggtttataaattcatgctttatcacaggcaccctctggaaaacatttcccaagattgatgccaaga

SEQ ID NO: 50245 - DNA, 175 bp, Mus musculus
  source 1..175: mol_type = other DNA
cattagtctgtgaagtttgccactatgaggacaaaatggcgacctgcatttttttaaagtaggttgagtcactgatgccccaagggatcttgattggctaactagccagtcacttatatttgaatgtattcacgtcttttaaatgcctttcacgcctgccgcctgcgtccagcgc

SEQ ID NO: 50246 - DNA, 162 bp, Mus musculus
  source 1..162: mol_type = other DNA
aaacccaattggcctataggctcgcaaggcagcttagcggcaccacaagcgcgctggacgcaggcggcaggcgtgaaaggcatttaaaagacgtgaatacattcaaatataagtgactggctagttagccaatcaagatcccttggggcatcagtgactcaa

SEQ ID NO: 50247 - DNA, 305 bp, Mus musculus
  source 1..305: mol_type = other DNA
acatgccctgagatatcaggagaaccttgccaagtctacttgaaatctatttggacacaaagaaaaccttacccaacaccacactgctgctttgcagcagagctgaaagctattgggaaccaaaggagctagaatgcagcaatggatgtgatcaggttccaacctgccacctttacagggtctttgtgaagcccagcctaatatgcttttaaaatgcataaaagtcttgacaagtgcttgcttaaatcttggtccagttgcagctgataaaccccttatctggcccaggcaggggggggctgtct

SEQ ID NO: 50248 - DNA, 357 bp, Mus musculus
  source 1..357: mol_type = other DNA
gctcttgaatacaggggttctaggtcttttgtcaaatacgtttccaaattaacttgaatatcaggttacgacttctgggagagcacagttgtctgatacagagctgttgtgatgtacatataaaaagatcccttttagggagactaattattagaatcctttgtcactcagataccggtctttaggagacaccacctgaaagaacttgtgagtggaccatcgactgtgaagtgaccagctggagagggtctgaagcctgtgagccccgggtgcccccgctgccacagagaggcgggggcggggtgcagcagaaaccacaccgggctcaagtttcctctcttggccagaaggggcagg

SEQ ID NO: 50249 - DNA, 415 bp, Mus musculus
  source 1..415: mol_type = other DNA
gttacgacttctgggagagcacagttgtctgatacagagctgttgtgatgtacatataaaaagatcccttttagggagactaattattagaatcctttgtcactcagataccggtctttaggagacaccacctgaaagaacttgtgagtggaccatcgactgtgaagtgaccagctggagagggtctgaagcctgtgagccccgggtgcccccgctgccacagagaggcgggggcggggtgcagcagaaaccacaccgggctcaagtttcctctcttggccagaaggggcaggtaactccgaccgagggcttcggagagaccgccggtgcgcccgcttctaccggggccaaccggtgctccgcgcccagccatggcccgggggcggggctcggccctcagtagtactcagaggca

SEQ ID NO: 50250 - DNA, 218 bp, Mus musculus
  source 1..218: mol_type = other DNA
aatttttttttaaagatttatttatttattatatgtaagtacactgtttcagacgaccttcggaagagcagtcgggtgctcggtgtttataggtatatatgtcccacagaacttgtatgaaactcagagaacacaggaattgattctctcatatgtgctgaagtgtcatttgggaccctgcgttgttgctaaacaagcccaatggcccagttgtccag

SEQ ID NO: 50251 - DNA, 424 bp, Mus musculus
  source 1..424: mol_type = other DNA
acgctgtcaggcccaggcccctagggggccagggccaggccactgcctgggggcagcaagtgatcctggggacccattaccctaagaaggtcaagggaggtccagggccaggcaggcagtctcttggtctggcctttgtgccagaaacccctgcagctggcagagggtgcttgccccccggaccagcggaaaacctgagggtcctttagaacctggtggagcctcctccaggactccaggggaagccctcctctcacagaggcggtggctacggttcctcttgcagagctgcctgccctttttcaggaattataggaagccagatacagcagctttctctgaatccaggcttccctgtccacctctggacagtggaactaggcctttcttgggtctgtaaaaagcctcccctagggaagaccag

SEQ ID NO: 50252 - DNA, 382 bp, Mus musculus
  source 1..382: mol_type = other DNA
cagggcttctctaaatagccctggctgtcctggaactcactttgtagaccaggctggcctcagttttttttttttttttaagtaaattacattaaaaatattgaaccagctgtaatgagatctgatgcctgtgtctgaagacagctacggtgtactcatataaatgaaataaataaatcttaaaaaaatatatatttattgggtatgtgtgcatgccacacgtgtatatcctgggatatacttctcggctgcctatagctaacttggtgaactttccgaggttgttgaaatgaccttggaggctgtctggctggacagttggcttccgtgaagcgagtgaaagcgcgaaggctgatttcacccaatgttgccttcagcggtg

SEQ ID NO: 50253 - DNA, 228 bp, Mus musculus
  source 1..228: mol_type = other DNA
agacaggttcaggctgtagcagctgcatcttcccggtgtcctgcatttaaccccgggataaatgcctgaatgcaatcctgctgctctagaggggcaatcagctgagaatgagtcttcccgccctcagactgagccactcggaagcgggaggctgccaggacgccccctcgcggagcccggggtgccagggtgccccctccggtcttcacctgctgtgggccccgcccc

SEQ ID NO: 50254 - DNA, 491 bp, Mus musculus
  source 1..491: mol_type = other DNA
agtgtcttgggtttcagatggccaacgttggccacttggtcaggtatcagggaggggcagccgcggaattcccgaggccaacgaagctaccccaggaggctgtctggggagcgttcagtgactgggctgcagagtcccaaacccaggcacccagtggccccggaaggcaaggggaatccctgttggccggacgccagaggagtcccctgtctctcgaccccaaagtttttttcctgaagaaatgaggccgagcgtttacgttgtacatctggaaacagtctgagccaggccagaccaccggcctccagctggggccggagccagggttcagaggtgcggccccccacgccccttcgggtgcggggcgcggcctcggcgtccccgggacccaggaatgcccccccgccagccggcccggcggccggggggagggcccagccgggagtttggcaaactcctccccgcgttgagtcattcgcctctgggagagc

SEQ ID NO: 50255 - DNA, 348 bp, Mus musculus
  source 1..348: mol_type = other DNA
aaaaaaaatgactctgggatttttattcgccttattctggattaggggagactgtaggcctctctcccctcccagtgtcttgggtttcagatggccaacgttggccacttggtcaggtatcagggaggggcagccgcggaattcccgaggccaacgaagctaccccaggaggctgtctggggagcgttcagtgactgggctgcagagtcccaaacccaggcacccagtggccccggaaggcaaggggaatccctgttggccggacgccagaggagtcccctgtctctcgaccccaaagtttttttcctgaagaaatgaggccgagcgtttacgttgtacatctggaaa

SEQ ID NO: 50256 - DNA, 376 bp, Mus musculus
  source 1..376: mol_type = other DNA
ccagccaactataggctgcctgctagctttggacagcacaaaattttctagcgatgtatttttacaactcaatgtttttaaaacagtgttgccagatctacccacagtgtcaacaccttttcaaaggctataaaatttatagcctaaatttatagtataaagtttacagtataaatcaacattgtggacaagtatatttaggtaggtatataaagttttagaatggtgtgttttctaaacaaagctcgcagtgttttacacaaaattgaactctcaaaatctaaattacattttctaaaataaaatagcctaggcgttggccgtgatgcactgggcctgcgcaagccacagtcacaggaagtgcggccacgccctg

SEQ ID NO: 50257 - DNA, 536 bp, Mus musculus
  source 1..536: mol_type = other DNA
ccaccttcagtgaatattgctggaacctggcaacaccagctgcagctggtatccagtcagaatcaaactcttaatgtagctcaatgcaatgagctgagcctcatctaatccagtttatatacctttaaatgggactacattgatagtaatttgtatctcataaaactattgtattatgttgattagtttatgtaaagtgataatataactgtttgctacatatcagatctttcagtttctatgtaaacaatattaataattcctcatccattaaatgatgatgattccttatacaagtatggaagtgattaaatgatttattattatttagctcagggcctggtatattggatatggtataccaaaaataaactaaaattttgatttttgagtgtgtaattcactttctatggctccccataaagaaatggttcagaatctcctgagaaactcttaaaggcatactcagtcagcctgcatccttaagattctgatagttctgaagtagaactaaagggtctgtcactactatgaca

SEQ ID NO: 50258 - DNA, 363 bp, Mus musculus
  source 1..363: mol_type = other DNA
ctaactaatcttaaaaaaaaagattttgtgttcagcaggtctcaaagaatttgtagtaagtttcttttaaaatattttgttttattgtttatcaaacctaacaagtcactgtactaaatactacaaaggatatcaatattagatatcatacctgtcattaaggttcaagcttatcttcaactacattatagcctggggtttacaagactttctcaacccttgcaaccatgtgatatatatatatatgtgtgtgagtgtgtgtatgtatatatatgtttatatataaatatatttatgtttataaataaaatatagtgaacatgtcattgaaagtactgcacagagggctctgaggcctgtgag

SEQ ID NO: 50259 - DNA, 341 bp, Mus musculus
  source 1..341: mol_type = other DNA
ttctcttccttcacctgagaaaagaggagcctcaccctggattagtggcttgttagaaaaccagcagtcagtgaatccatttctatttgcagattcccagggacacggtaggaactttcttgtgtcacaaaatatttattcagcagacttttttttttttttcctttgaaggcagaataaaatgaagtcaggaacggctgcaggcctgcaggccaggctagctatcaggcttgctttcctgtctgtagccagctgtgggatgccagcattgctccgagccaaagacacagccacgcgtggaatgtcctgcgggccgcccgcgcgcgctgtcaacacgcccc

SEQ ID NO: 50260 - DNA, 379 bp, Mus musculus
  source 1..379: mol_type = other DNA
cctcagggcctctggggaagaagttacttcattccctttctaatgtttttctgttgtagaagaaaattaagtagttcttttatttttaattaaaatatgtatttatttattgtatgtacatgtattcatgtgctatagcacatatgtggaaaaggataacttgtgggaataagttctctctttctaccatggctttttaccacctaggtactgtaattcttttttaaaatgtgctaaggttaaatgctgttaaatagcaagcagatcatcaatgtgatttaaataacacaaaatcacacagcagtattttcatttcaaagagatctaccatttacttagattcctagttttgtaagacaaagtttatctatacaggaca

SEQ ID NO: 50261 - DNA, 456 bp, Mus musculus
  source 1..456: mol_type = other DNA
actttcttgtgtcacaaaatatttattcagcagacttttttttttttttcctttgaaggcagaataaaatgaagtcaggaacggctgcaggcctgcaggccaggctagctatcaggcttgctttcctgtctgtagccagctgtgggatgccagcattgctccgagccaaagacacagccacgcgtggaatgtcctgcgggccgcccgcgcgcgctgtcaacacgccccgcccccccgcgcgcaagggcacacgcagcagccactcgtactgggcgcctgtgagcgcgctcgcccttgggcgcttctgagtgtgtgcacccctaggctctcttgcgctcctaggcgagggggaggagtggctacactgcgcggtagaccggcgggcgggcggtgtggcagcgcacggcggcggtggcggaggtagcggcggcggcggtggcggcggcagcggcgcgg

SEQ ID NO: 50262 - DNA, 302 bp, Mus musculus
  source 1..302: mol_type = other DNA
gggcagagcattttcattgtcctgccaacaggccaccccggtggggtgtcctccaccccttaaaggcctttcacctactttgcagcgtagcaagcagaaagtgaaatctatttcacaagcaggattgaagagtcttactctgccgactcaaaggggaagttgtgaaatctcctttagatcataaacataatctcaccagcttgaagaagttcttgataaaaaattctaaaatacctggatgccggcccgcgggtggtctaggacagcgaccaaccggggggggcacagccgccagcacagcc

SEQ ID NO: 50263 - DNA, 358 bp, Mus musculus
  source 1..358: mol_type = other DNA
agatatataatagattagctatattatggtgtgccataatgaagccctttattttccatagtaaatctgcactaatgaaggaagactcatgacttaaatatgagtttcttgattaataaataacttcccaaatattattaatcctatatgagcaaactcctgaactgattccttgattcagtcatatcacagaagtttcactcttctgaaggaaacagataataattaaataatcagatgggaaaaataatacctaatgggtaacattagggaaggctggggttactttcttgcctcccaaaacccaatgtagtctgaataggaattggaggggaagcctggcttgcttcctggtcta

SEQ ID NO: 50264 - DNA, 421 bp, Mus musculus
  source 1..421: mol_type = other DNA
atatctatcatagtgcctagtcataattataagtcggggtgtagagacataaaactttaatctcaacacttaagatgtagaagctagatttggctatggattcagtcattaaaaacactgttttttccctgtccttttactctaatattttgaattttatacaagaattgctgaaatactgtgaagtcatctttccatcagtgttgggttcactatccctgtgataggaataaatgtggacactctggaaaacacttggttttcagcagctttaccccttattagacacaaagatgaatattctgaaattttctaatttgaactatcttgacagagtgtgcagacattgggaggaccgtgcctacatcttcagcttgtattatcataatcaaggatttgccaaacatttaccaggtggtgt

SEQ ID NO: 50265 - DNA, 392 bp, Mus musculus
  source 1..392: mol_type = other DNA
atatctatcatagtgcctagtcataattataagtctgggtgtggtgacataaacctttaatctcaacacttaagatgtagataagttcaaagctagctttggctatgagaaatgttaagttatagaaaacaaacaaaaatgtttagtggactcagtggatgcagtaattaaaaacctctaatactttgaattttatacaagaattgctgaaatactgtgaagtcacatttggtctttccatcatactgaatatacactgtggacactctggaaaacacttggttttcagcagctttaccccttgaattagacacaaatctgagtattctgaaagtttctaatttgaactatcttgaaaggagagtaattaaggatttgccaaacaaccaggt

SEQ ID NO: 50266 - DNA, 310 bp, Mus musculus
  source 1..310: mol_type = other DNA
tggagctcctaaggaaggctttccctgcctcttagcatgtgtccaataagtgattacgggctgcagactccaccacctgtctgtgacagctgcagtctcaggcaaaaaataaggaagtccgccttggtgtttccttttcttcaggaaaatagtcagagccgatgattatgctaatccttagacctgctctgggatggcaatatcgtagctcgacaatccatttagaccttccggttctagcgcctctggactcgcaaactttcctatgcaaatctgagccaggttgtccccgggtcacatccgcccaggg

SEQ ID NO: 50267 - DNA, 217 bp, Mus musculus
  source 1..217: mol_type = other DNA
catgggcagcaggcacctttaaataaataaattttaaaataaactacactttctctcatatcttcgtgaaactcaagaaagtctaaccattcatcacataattattgcttcattgattgtgactgtagcccatgcagtgggcaaactactttgtttcctacatgtcctaagagggaggccctcccggccaacgactgattgataaatcaaacagcca

SEQ ID NO: 50268 - DNA, 395 bp, Mus musculus
  source 1..395: mol_type = other DNA
ttgtaaaggtgtgtgcctccagcaccacctggagtcacctgcttaggatggtatcacccccagtgggcttggcactgccccacatacatgcctacaggccattctgatgggtcagattgacaatcaatgtcacagatatctagggtatttagaatgatagataataatgctttttatttattctccaatggttaagacaaaagtaaaggtccgcaggtcccgtgtgaacactagactggacatgcattgcagtacctttctggcttaggcccaggcaaagcctatcctagggtcctgagagcaagcaagagctcaggagcagctggaaggtctggctgtcaatccctgcctgttgatcaggacataggctggcaaggtggagacctccccactgg

SEQ ID NO: 50269 - DNA, 228 bp, Mus musculus
  source 1..228: mol_type = other DNA
ttagcttgggtcaacctcatttcaaaataaagtttaaaacaaggccgtagtttcaccctcagtaccaaaggggggaaattagtccgtccctcggccatctgagactgggcttgggcccaagctaagcctggatctctctcagttgccaggtgcgattcaggtcctcgggaagctgctcaattggtccattaggagggaccttccggcggtttccctgcagctactgcg

SEQ ID NO: 50270 - DNA, 467 bp, Mus musculus
  source 1..467: mol_type = other DNA
actgaataggtaacattcttactgaattccattggaacactgacaaaggcttagctatatgtcaaccaggaggcgaagtttccgtgaaagtcttcacctcatgacttaccattttagttatctaaaagcaaagaataaatgtggctgtcagcgcgaaggccagcggcggagccgtgcgtctcaggactagggaggcctcggagctcctctgacccgcttgatcgaggaagcggcggaaaccccggcccgccgccgccggtgtccacgcatgcacgcaagggcagctgggcggctcgcagctgtcttgagcttccgccgccagtgcgggaggcttcgggagcaggtcccgccagcggccagaggcttgccagctcccaacatggtggcggcggcgtcagggagggcggtgccacatggcgtagcagccaatgatcttccgggctgcgccgccggcagcacaggagagg

SEQ ID NO: 50271 - DNA, 427 bp, Mus musculus
  source 1..427: mol_type = other DNA
tcccgacaagccggaaattggcgcccagactcgcgcgccagaggttgccctggaaactgctctacagagaactctccttggtgactgcaccaagggacaaaaatatcatttgaacagtctttgcaacaaatggttttgaaacaatgagcaatccatagcaaattaatatctatgtaaaaaacaatggttcatacacctagatgtaaaacctagaactaaattttctataatgaaacagagttggagttaagattctaaagaacctgtagttttatatttctaccagcagaataattgttccagtttgtcagaatgcacaggaaaaaaattggcattatctacatactgcttaacctatgagaaaatggataattaataccaaagccaatttgtcttatgtggcttgctcgatccaccccctagacag

SEQ ID NO: 50272 - DNA, 333 bp, Mus musculus
  source 1..333: mol_type = other DNA
cagcctgctcctctgtgctcagtatctgccacatgcctcctgcacccctgcatgcaggctgctgctgaagagcccaaggccccttggtcacttggctaccacgtctcctaagtcagtcaaatggtccaacgctgtgaatagctgtgtgctgcgtatcaaagcctggaggcatgcaggcattccggccccactgactatctctcagaccccccaccttctgacagtctgttggaggatggagagtgtacccatcagcacatgctgtgaggatgctcagtcccaggggccaagcagctcactgatttgtcagcgaggctgttagcttttaaagga

SEQ ID NO: 50273 - DNA, 342 bp, Mus musculus
  source 1..342: mol_type = other DNA
gacagcatgtgacagattgtaacatacaactaaatgcagaagaagtctccatctttccaaaggtgctgtaaagttctgtcagcccctggctggcccagggacccacggcctgcctgggcccacggctctggcaggggtccggcaggggagtctcgagatcctgggaagcccacgggaaagccgggtgcagccttacatggcgctctggtccccaagagtccactggggcgccgctgcccgtctctgtagagttcgcaggcccagcgctctccggtctcaggccttggacagctggcgccaagcaccttgcgagctgcgcaacgtcatagtcattattcccga

SEQ ID NO: 50274 - DNA, 419 bp, Mus musculus
  source 1..419: mol_type = other DNA
taattatccattttctcataggttaagcagtatgtagataatgccaatttttttcctgtgcattctgacaaactggaacaattattctgctggtagaaatataaaactacaggttctttagaatcttaactccaactctgtttcattatagaaaatttagttctaggttttacatctaggtgtatgaaccattgttttttacatagatattaatttgctatggattgctcattgtttcaaaaccatttgttgcaaagactgttcaaatgatatttttgtcccttggtgcagtcaccaaggagagttctctgtagagcagtttccagggcaacctctggcgcgcgagtctgggcgccaatttccggcttgtcgggaataatgactatgacgttgcgcagctcgcaaggtgcttggcgcca

SEQ ID NO: 50275 - DNA, 392 bp, Mus musculus
  source 1..392: mol_type = other DNA
agatttagtgagaaaccctgtctcaaaaactaaggtagagagtgatagaggaagatacgtgtatcaacctctggccattatcctgtccatgcagttccgtgcatatggcccttgcacacacctgctacacagctttcaggaaggatctgtttcctcctctacatctcaatgtttgcttttggctacaaggtgacattaaagatgagctaatgcagccagccctgcctccaattcctacgacccacccctggtagtgagggcaggttataaccatgcacaaacacgttatcagactgtttttacagtaagaggcaccttgtctgttgatgtcagcatatcagcctgcccagggcccaatgggatggccacacaggcagcccaagggtacacat

SEQ ID NO: 50276 - DNA, 378 bp, Mus musculus
  source 1..378: mol_type = other DNA
ttcaagtctattctggatccaggaattaactgcgttttagtaaaatcctggtgtgtgtcagaatcaagcgagaacctgtcagaaaggtcctcgctgggccttactctgaggttaggaccaggccagcctggtctacaaagtgagttccaggacagccagggctatacagagaacagtcaaacctaaaatttgtcaaagtgtaggttttggcaagtggatccacactccagctgggtagtgccatctcgagaatgggatgctcccgcctagggaccgccagcaccgcgggccgggggatcagcgaccttgtcactgagatacaggcaacgccttggacagcccgtcgcgcgccatgacgtcactgagccgcccccgcgg

SEQ ID NO: 50277 - DNA, 854 bp, Mus musculus
  source 1..854: mol_type = other DNA
gggctgggcccggatcagcgctgactccgagcctggcgggggggggggtctaggctcgagcccagggcgccctccccgcgcgtgccgcgctgctctgcgcacttggcgtcccgcaggccgggcctagcaccgcagcccgtcgcgcgcgctcggctctttccgccgcggccggcgcaggtggaggggcggggcgggggccgtgcgtggtgacgccgcggggggggtgacgtacaagcgtgccccgccccctccccctccccgctctggaaagagaagaaaaaaaactttctttttttttttaattgaggagatccgaccggggcttcgagcgcgatctactcggccccgccggtcccgggccccacaaccgcccgcgcaccccgctccgcctggccggcccgctccgcccggccctcggcgcccgccccggcggccccgctcgcctctcgtctcggcctcccggagcccggcggcggcggcggcggcggcggcggcacggggtgggggggccgcggcgcggcggcggccccgctcggcgcattgtttttcctcacggcggcggcgggccgcgggcgggcggcggagcccaaagccccccggtcgtccggccgcgggcgaattcaggggggggggtggcggcgaggcggcggcggtaccaccatgttcccgggcgccgcctgagccgcggggccgggcgccgtcgctgccagccgggcccgcggaggcggccgggccgcttgggtgcccgggccgcggagtgtcgcgctcgggaggcgggcaggggatgagggggccgcggccggcggcggcggcggccgggggcgggcggtgagcgctgcggggcgctgttgctg

SEQ ID NO: 50278 - DNA, 413 bp, Mus musculus
  source 1..413: mol_type = other DNA
aaaacaaaaacaagaaaccctatgtagcatattttttgttgattgtatatcaataaagctgcagcctaagccctgtgtttaatttccagtaccataaaaccaagctttgagaactgtaaagttcccagcacagtcctatagctggctctcagggctacgactgaacattcaggaggccctgcccactggaaatggaccatgtcattcaggcgattccagcattctctgtacagaggccctggtcgtcgacctcaggtccttgacctatctgagactttaggtcaaggtagcaaatattctaggaagactcaatcctggaccttagcccaaggggaggctctgcttctctgcttggagcctaggacaacacccacagtagcccttgggggtctgggctcaccatataaatagag

SEQ ID NO: 50279 - DNA, 435 bp, Mus musculus
  source 1..435: mol_type = other DNA
acaatcatacaatatgtggcctcttgtgacttcatttttatagtcgaataatattcggttgtatagatagtctatatttgtacggtgtggcagatatagaattgtgtttattcaggccagagtttacacagaccaatgtagaaaaaacagttttctcgactttagatggcttggctggtgatgatcatttccatcccccagcaggaacactcctacattgctggcagaatgggagggcttgggggccaggctgcggggcaagtaggcctcggaagaaggcggaggcctggtgcccacagcaggcggcccaggctcggagcagcccagggcggagggcggcgcccagagcgcgtccgcccggccccgccccgctgcagccccgagccgggcgcgcgctcctaggcggggtggcgcgctgctggtgcgcgtgtcccg

SEQ ID NO: 50280 - DNA, 367 bp, Mus musculus
  source 1..367: mol_type = other DNA
cgcgctggcagcctgcctcagggccgctgctggcagccagccccaagttacttgtgggaaacagtggcacgcaagtttccagggggcccgggtcggctcgaaagggagcgcgccagagtggctctgctccgctccgtgcagtggcctgctgcagccccagccaggatagcggtgcgcaaagaccccgcactgggcagtcctcaccggaccctggactgcacagactgggatcccgtgcgcgcccttctcgccccagcatccagtcgccctggggggggcgtccttactccgcggaaggaggccggggagtgctgtcaccagctgtttcccgccttcccggggaggcaggctggagagacctcccgcc

SEQ ID NO: 50281 - DNA, 404 bp, Mus musculus
  source 1..404: mol_type = other DNA
gtgaccaactcattgaacttactgacgccaagtgcgatgaccccggcggcgctcagattaggaagataacggaatcctggatcacctccgcggcagccaagggccgcgggggccctggccaaggtgaccccgcagggggaggcgagggtccccgcccctcgcccgctgcggccgccttcccccaggggcgggatatctcgccctgccccccgccccccaggccttgtcctagcgctgccctcgggctgggggcgggaccgcggcaggcgcgaggaggacgcgcgtctctgccgtggcggggctccccccgcgcacgctccgtctggcagctggcgctccgggcctggggccgccgcgagggagggagggagggaggccgccccccgcgcccctcctcttcgccc

SEQ ID NO: 50282 - DNA, 396 bp, Mus musculus
  source 1..396: mol_type = other DNA
ccccaaaggccctgaggcctgactctaaccacaaaccatgggggtggggaggggattttttctgaaccagcccctggcacagcaccctcctgtctagtcttgaagctttcagtaactgaggggcttgagctgacatatgctcctaggtcccagtctctcatttagagattttatataagaggctcttggaaccacttcatggcctttctagcttttgaaattggaattagctaacaacaaaaacacattgtgagattacgcctaaaaaatctagatttgtatgaaaaatcctcagttttggcagacatggggactcagccatcatctatttttcagttaaaaagcggtatataggtgggtgtgtataggcttggtcaaaccccgcctcagccaatt

SEQ ID NO: 50283 - DNA, 343 bp, Mus musculus
  source 1..343: mol_type = other DNA
actatatagtcccgaactatgtaccataaaatcatttttaagggaaaattgatgctcacagatattgagaataaagctatatatcacttggtcattatcatcatacactctagtatgaaaaaaattgcattataaaatgtgtatttttacatctttagtcccaggacttgggagaggccagcctggtctacagagtgaattctaggacagccagggagagaaagattgagtctcagtggttcttgaccagtattgcaagtctaatcctgcagcaattgaaaggacagctagtcccccaggcatcagggcgtgacttctcaggtcgtcctggcctctgaagaag

SEQ ID NO: 50284 - DNA, 278 bp, Mus musculus
  source 1..278: mol_type = other DNA
gtcacaagaccatgtgttgttccgattctgagtctgttgtgaggactggcgcacgccttttgataaattcaaggccagcctggttaagcatctgatgtttaaaggacacctcagatgtgaaataaatcctattttgaaatacctggttctcttaaatattctagcgattttaacatcctgcaccaagtctggggccgcccactggtcctctggccccgaggcaggctccgcccacatgcgcggtgccgcgagagtcacgcctctggaaacgcgtcgcg

SEQ ID NO: 50285 - DNA, 164 bp, Mus musculus
  source 1..164: mol_type = other DNA
tagctgaaaatgatcttgacttttcatcaaagttcagttatggacaagcataataggcatttacaatgctcattgaattttctgcactcctagcacttggcgtgcgcaatgcttacgctctgcgtgctacggatgcctcgcctccggaagacgcgaccggcgag

SEQ ID NO: 50286 - DNA, 393 bp, Mus musculus
  source 1..393: mol_type = other DNA
atccaagtgtgagctgaatagaaatctcacttgtcttgcaagcctttaatcccagcaccaaaaaataaataatttacagttcctacaaaagttaatatagatgctcatgtatttattaaaatagtaaacaagtccagtactggaaaggcagagcctggtcttaaatagcaatcctaataataaataataccaaaagcattttatgagtataggtcaatgttttacgaatgtagatataatcagccagaaggctgagacaggtattatgtctagcagaaaccacggacttgcacacttgtgccagtgtgctcactcgggcgcttgaccaggacctcaggcgcccccctggaagcgtggcaactggcaggtcacacactggcgctgctgtaggcc

SEQ ID NO: 50287 - DNA, 502 bp, Mus musculus
  source 1..502: mol_type = other DNA
ccagctgtatttattttttaaaactattaaggatatttatacttattcttaaacaaaaatctacatactatctttaatttataaatgtgtcattctgaagtttagtcatttgcaactgaatctattcagagggccccactttattgtgtagaccagacaaagaaccttttattggactaaagagagaacatcttatgtatttattgtatggatgcatcacctatccgtctatggcttaggcaacatggtacctttgcacaggtaaccagccatgtggcagaatgtaggttagaaaacatgggctattttaagttatgtttactcagagaagagcctagctatatggccaaggtatttgtaaatatattttgggctggaaggaagaaccagggccaaacttcaacacctgcctgtcctggaattcactttgtagaccaggttggagggaggcatctctttgagttcaaggtcagcctgttttacacactgagttcgagagtag

SEQ ID NO: 50288 - DNA, 286 bp, Mus musculus
  source 1..286: mol_type = other DNA
ttatttaaccaatcaggaggtgatagagaataatattttataaaatactgagtcatactccaaaactttaatagttaaaaaagtaattaagtgctggcgaatttctaagttcgaggccagcctggtctacagagtccaggacagccagggctatacagagaaaccctgtctttgtttgagcactgacaaatgctagtgctgggattccaggcttgagcccctcgcccaagagcctcccgctagctgccgtgcgcctgggggcgtggcctggtgactccgcccctcg

SEQ ID NO: 50289 - DNA, 379 bp, Mus musculus
  source 1..379: mol_type = other DNA
aataataaaagaataaaggctgtgctttattctctactaccatagattcaaagctatataaaacataaagcagccattggagttacttgatctttggaataatcccatatactagtgccttgcagaaactagatgaaatgtagaagccatttccaaacaacaaaatatttttttttaaattaaaattagatttcttcttctttttttgttttgcatgtatatatgtatgtgtaccatttacattcctggcatgcacaggaattcagagcaagtgcactgcttagatttttaagttatcctgagatccctggagctcactgagagttgctatggcaactagtgctatagagatgtagagaccctattgtgacttctttag

SEQ ID NO: 50290 - DNA, 457 bp, Mus musculus
  source 1..457: mol_type = other DNA
cagagttctctgtatagccctggctgtcctggaactgtagaccaggctggcctcgaggcgggtggtagctctccctcaactcttggggtgcgcagcacgcctggctggctggcctgagggagcgcgcctggggaacgctcattgcgtgaggcgcgaagccccgccctaaggcgagaggccaggaggttgggcctttctccacagccttgcggttccctctggacagctacggggctgaggcagcctttcctgcggcagcgcttggccggtgaggggctggaactgacggtgagtcacctctgagacttccaagcggcttccgaagggacccctctcacacgccgaggcgggggctaggcttcgaaaccctccgcccgcgtgacctagcccgccgagctccgccctcacccgccgcgcggtgggtgccgggagctgtaggctcccgcctcagggaatg

SEQ ID NO: 50291 - DNA, 216 bp, Mus musculus
  source 1..216: mol_type = other DNA
cagacagagcaccctaaggcactcaaaacagagctctcctggagctcactctataagtgaggctggcctcaaactcagagatctgcctgcaatgagcttaattccctctctgtgtcacttagaggcataagccttatgtaatcagagggcttgaatgaaaggctgccattcactccttaagcacttgtcaaatattaattgaagctctggtctgag

SEQ ID NO: 50292 - DNA, 421 bp, Mus musculus
  source 1..421: mol_type = other DNA
gagaagacaacgccgccggaagtggcatgtgcggggctgtaaacaccgcctgcgaaatgatgcgcccgcccccgccgccgcctcattgggcggccagcggcccattggtacagtcgcgacctcactcaggtgacgtcactggcagggctccggagcagcttccaggaggtagcagcgccttgaaaggcagatgctctgcgataccgagcgttttcgtgatgctaagcacagcagcacacaggacctccagggcccagtgataaggcaagcttgtgcctcagcctggggcacgggctgcgcgccccactgagatcgctcgggagagggcgtccacgctccttcccggtccgttcggcgggggcgtcgcggactacacatcccagcatgcttcgccggccgcggggcagcgaggcgcggtgag

SEQ ID NO: 50293 - DNA, 320 bp, Mus musculus
  source 1..320: mol_type = other DNA
actatggtgaagtcaccacctgatacttcactacgctgctctcctggaacagcaggttcaagatgggaggcacttctaagaaatcctggtttccctatgtgtcaaagggggagaaatagaccaggctggcctcgaaagcccgaaggctccaaggcttggtggttattgtcgacattctcgaaattctgagggtgtctaaatgtagacatcgtgtgaaggagataacccccttagccgcgacccactgtggctactcctggactccatttcccctggaactgcggggcgggggcgggggcggggcgccgggcctaggccgg

SEQ ID NO: 50294 - DNA, 330 bp, Mus musculus
  source 1..330: mol_type = other DNA
cctggcctctggccgtggcactggtgccagtacttcatttttactgtatatttatagtaataaaatcatgcagcaatattcacaggacactagagtggtttctggcagaactcctgacaccctccaaacatagacaaactcctgtgatgtttactgaacattaatcaatgtgccagataagtaaggcttaggtcccctgtcacctagtcacttagacatttaagttttttaacccctcatggatgaggtggatattgagacttcagatgccccttggagggtggcgaactacataactccacccccacctgggttcaaccccagaagcac

SEQ ID NO: 50295 - DNA, 367 bp, Mus musculus
  source 1..367: mol_type = other DNA
taggtcccaggggcatgtcccttgcagtcagcacgcgtctcgggaattccaggtgaggccaaggcctcggccagctttaaggcgttgctcagaaagttaggaaagcccttctgtgtgtacagtgggacccgtacaaggcccaggacctgtgggacagagggggctgggctcttcttgtagaggcaggaccctggcagagatgcctgtcagccaccagtttcaggggagacccaggcagggtctggccaggccaggctggtggcaggattgacagcatagccagggtgaggaccctgaggggtacttgttacccaaggtgccttctgtcaggagtgggaatgggggcgggccccaggcagtagcccca

SEQ ID NO: 50296 - DNA, 453 bp, Mus musculus
  source 1..453: mol_type = other DNA
tatcctggaaacagtcctgctgcaaggctcagtgagtctgtggccagcctattcaagtaaaataaaagtttctatgtctcagaatttcagttgagctgataagttattcttaaaattcttaaatcttagttttaaaaaaaattctattcttcattcctccaagagatccatgaaggcctcgagggagcccctgcagcccggtcccggcgactatgcacgaccgcaggctcccgtgtggctcagcagtctggcacggcggcgggcccgtgtccccaacagggctgcccacccgagcagactcagggcgccttgggccccacctctcagagggccctgccgcggcccggcctaccttgcaaggcccgggccgcgacagcggctcgcccctcaccggccgacagccctgcgcccggcccaccccggaagtaatcctcgcacggcgcagagcatccc

SEQ ID NO: 50297 - DNA, 377 bp, Mus musculus
  source 1..377: mol_type = other DNA
tgcactggagtataattaaaatacaaactaattcattaatataattaaaaataatctttagaattagaggtttaagatccattattcaagagatttttttttttagtcatcactcaaatgcgttcagtcctcaggggcagactacaggtggagacgcttttggtatagctcagaagaccgagcggctcagtgtttctggccccgcctcgccccgccccgcgccaggcgtcgttgctagagccgaggggagggtctcattccctgccacccgcagccaggaccacccgcgtgggcccgtgctgagtacggccacccacggcggcctggcgactcgccgcctgcgctcccgagcgaatgggccggtccttcccgggatg

SEQ ID NO: 50298 - DNA, 321 bp, Mus musculus
  source 1..321: mol_type = other DNA
catcatagactttcagtccatataaaagcaacaggtgctctagtatcattgttgttgatttaacttagatcctctgccaaagcagccagtctatgttaaatgctggaatttcaggggtggccttcttctcatctgaagtatactagtataggacattttcctgtaagcaggaaacagaggaaacagcctgcctgcttctccagcgagatgggggctccccagtgggtagtatgcccgagatccctgttgcgcaggaacaggtaagaccctagccttagcccctcctgcctgaggggggggtcacaggaagtagggaggagg

SEQ ID NO: 50299 - DNA, 409 bp, Mus musculus
  source 1..409: mol_type = other DNA
gcacatgtgcatacatctacaccgacacatgtgacacagtgtgcacttgggtgaaaacttcacagagtcccctccgtcttttttaaaatagtctcatgaaattcagcctgacttcaaacttatgtagttgaggatagccttgaacttcgatgatcaaacccaaggccttgaatatgtgtccagcccccagtttgattatctctttgtaatcactctgtgataagccgaaggatctaaccttgatgtgtctaccgagcacagcatctagactctcagctgccttctctaatggattctaaccctctggaatgtgagccactattaaatgcttttttaaaaataatttatcttggtcagtcaggtcagcagagacctggcgcttgcctggcagcaggcccggtgcggatcc

SEQ ID NO: 50300 - DNA, 771 bp, Mus musculus
  source 1..771: mol_type = other DNA
cctgtctccagctgtcaaaacttcttgcaaagtgtcacactagcggctggaccagaccgcggcgctcaccgtccagagccgacgcgggccgtagacgtccccccgtggtggtcctcatgccggcccgggaccctcgggttgcggcgcggctcagcggcccgctcccgagcgctgcaggcgggcgcgcggagggcccgcgccgcggcccatggccggctccccagcccgcgggaaggaagcctctcgacaactgccgctttctcttgtcagccagcgggggggcgacgccgaggacgcttggcggggacgccgctccggaagccgactgtcgagctgggcgctcctcagcagtctggagctcccgccccgagcgcgggctcgcgggcaaccggggcctcttctgccccgggctgggaccgagactggcttccaggccgcgccagggtcagtcaggcccgggacctcaggctcggcaacggcccggggcccgcgcctgcctaacagccgtaacggacggaagcgagcgggcagcacagtcggctccctttcgcgctagtccggccgcgccgcctccgccgccgctgctttggaccgcggatgcttcggcttggagtctctgggcttcgacgcgctgagagcgcggcgctcaagtcacgtgcctccaagcagtccaatggacggccgcggcgcggtgacgtcagcgcatccgctaggcggatgacagtcaggccaactccaatgggcggtgccgcggcgacctgaagttcccgg

SEQ ID NO: 50301 - DNA, 566 bp, Mus musculus
  source 1..566: mol_type = other DNA
cgaggaagccttcctcctcatgagtttggattttcaaagccacgatttaattttccatctgggtgctgaacagtttctgtctggacacagcctgtctttagtcaatgttgtcttaatattgttgacaattctgtatgaaaccctttccttttatggagaaaatgtgacactgtggcctactcccgcttttccttgaaatgacagatctaggtgattttaatgaacatttgtctttcagaataggattgtgtgataatgtttaaatggcaaaaaaacaaaacatgattttgtgcaattaacaaagctagcaagaaaaaaaaataaaacatttcttggtaccataactgtatcattgtacccaaatgctagggggacctaggtaggggctccatctagccggacgaataacttgatggacggccccgccgaccaatcagtggtggccagcccgggtccctgctgaaggcgaggcgtggcctatccgtctagccactcaccaggctacagccagtcgcttgaggcgtgccgcctatttgcggggcgggcgttgcgcgccaagctcctga

SEQ ID NO: 50302 - DNA, 594 bp, Mus musculus
  source 1..594: mol_type = other DNA
aaacttctctctgtaaacacagacttccctaagactgatttcggctttcctttgacaaatgatcatggaactcttggttttggctgttgcaggggacacaaggaacagaacgagaggcactggatcatggggcagcgccgggcagtcggaacgcgggtatggacggcttatcctctcctgctttgagaggaggtccggagagaccctgggactccacgccacgccagagttctctgcagtggcagctggagccaagagccgtaaccctcccctgggatggcctcagggttcagagcagggaccgccgcggcccctctcggcctcggtcccccggggaccggacagcctcccgctcaagcgtccgcggccagctggcaaccctgcgaccaggaaaagcagcttcgcgccgtctttcgttcagcgctggtcgccaggcgccgccgcacgggcagccgggaacttcaggtcgccgcggcaccgcccattggagttggcctgactgtcatccgcctagcggatgcgctgacgtcaccgcgccgcggccgtccattggactgcttggaggcacgtgacttgagcgccgcgctctcagcg

SEQ ID NO: 50303 - DNA, 440 bp, Mus musculus
  source 1..440: mol_type = other DNA
agactgattgctgtttctcagccagaactagttttctatcataccaggcccggctcagagacagtagcgtgctatggctgtggccatcgccagtcccgcgggagcagagaccccacttccacctcgggtctcccacacctgtctgaggttccacctgtggctcatcacaagaggagtgtcgattgcccaggtaaacccttcagccagagggcgcgccaggctctatgtgcacgatgggcgcggcctagcgcaggtggcctagtcgtccaggttctggcgacaggctgcgcagcctctgcagtaacaggcaacaggggcggtgtccggcggggacccagggagcgcgtccgaagccccgcctgcaaggtaagcgccaccttcccggggtgcggcaggcaagcaagtggccggcgatcgccccgccctgttcctgtagtgac

SEQ ID NO: 50304 - DNA, 234 bp, Mus musculus
  source 1..234: mol_type = other DNA
cccgcgttccaaattcatttaaaacaaacttgtggggcataatggaacatgcctttaatcccagccctcaaacctatggggggtgggggaatgagtcccactccctgggagatccctgggtggggctcactggccagccagcctgactacttcaaattccaggccagggctgggggatggagaagtgaatgtctggtggattgtttgtcctctccaagccttcctgggtaagag

SEQ ID NO: 50305 - DNA, 250 bp, Mus musculus
  source 1..250: mol_type = other DNA
agaggaaaactagtttcttctggtcaagaggaggaaatacccaaaacagggccaggttggggacctgtgccttgaatttcaagccagcctacctataaatcagagacctggaactcactctgtagaccaggctggcctagtccagactggccaccacttctggtttgtgcaacacagaaactgttcttgcaattttctgtaagtttgacataatatgagaataaaaagcgaattcgaatgccacgtgggg

SEQ ID NO: 50306 - DNA, 468 bp, Mus musculus
  source 1..468: mol_type = other DNA
gttgtattcaatgtgcatgcatcttaacaaatgaagagataaacattttgcttaataaattttctcactaaagagccagaggccctatggtctcttcatgtgtagccatgatcttgtttatacattcacttctcagggaatggcctctttcctcaacaaaactaggaaattcatccaaattgtttttatttatttagtctaaaatttaatctctcttgttagattattaatttgtggatactcacagaagatgagatatggcctcctataggggtagaaatgacttcacagtaggtaatcattatcatcattattatagtttgaaatttatcttagcggtctttaaaagaagttcttagactccaataaaggtacagctttactttgctaagtccattttgggctaaagaggcgatttcataatcacctccccctgggcagggtctggggtgtgcgcttgcgcatagc

SEQ ID NO: 50307 - DNA, 401 bp, Mus musculus
  source 1..401: mol_type = other DNA
aacaagctagctctagaagcttccaaatggagattttggcacgtggcttgccagtgtgcaattctgtgcactaattttcagagcagatactgttactgttatatgtgtgtgtgtgtgtgaacacatatacacaaataacaaacaatctcagttcattttatttaaatgaacccagttcagggaataaagaccaactccttggtcccgtggatgtgtgtgtgtacacgcgcgcactcgcgcgtgtgcgtgcgcaggtaggccagacccaccctagcctcgcccccggctgatctgagctcgcccgctccaggaactgtttaaaacgctccccagtcaggcccaacccggcccggtccgcctcgccccgcgggcaccatcttgccccgcctcctgggccggaa

SEQ ID NO: 50308 - DNA, 282 bp, Mus musculus
  source 1..282: mol_type = other DNA
gccagcgctgttgtcaagtgaggactctgggacgtgcaaggtgccctattcatgtgtacatatagctcactttccaagtgcttggcaaaggcttggtaaaaattaaaataaaaaccaggcgtccagttcatctgtccgtcatgtcgcaaggcctcacctgctgctgctggcaccagcatccgagcatcccgaagcccgctggacggatgctcggggctgcctgtggcaggcgagccgccgccagccgctgtccaacgttagctcagagaaggtggcgggcgg

SEQ ID NO: 50309 - DNA, 330 bp, Mus musculus
  source 1..330: mol_type = other DNA
gccgagttggccatcacggcccattggacttgcaaactttatatgccccagaggtagatgtgttatttaataggaataaaataattggcataacaattgtcacagaaattcttgtatgagtatcttgtgaagtgagaatttattgatacataaatatgactggttaattatatatataaaaaaggagtccattgaacttggagctcacaggtttgatggttagggttgctggccagtgaaccctaggaatgttgaagaataaaaatttttactgaactcttcttcaatgactccttagttatgtaggttccttgataggacatgactcct

SEQ ID NO: 50310 - DNA, 250 bp, Mus musculus
  source 1..250: mol_type = other DNA
tacagttttttaaaactgtgtcacagcaagaactgcagactgcaagtcaggttagcatggaccctcgtgccaggaatgagtttttgttgacaaagaaaatacaagaatgttccctgttgactaaaagaatttttgtggaaaaaaaaaatcccgaccttttcttttgtagtcagcatggaatcaaaagcgcctcaggaggaggctttgcaggagactctgcattagagaaagtcagcctcctctgactccc

SEQ ID NO: 50311 - DNA, 337 bp, Mus musculus
  source 1..337: mol_type = other DNA
ctccaacttagaaagatccgggatcatcgttcttagtggctgagtgatcctccagcctagtcactgtcttccaggaagagaattacaacttttcaaaactccaccaggactgcttagctatgcataactatagtaattgtttcctgggcatacttaggaacaatatgactctaacacttaaagcaaattatttaacttttttttcttgtccatatttaaattttgcagaggcgtccccactctggacggccatatgagcctccagtggccgccacaagcatcaggtgttagctagcggctgccgccgcgtgcgcatgcgcgacccgagccggcgctt

SEQ ID NO: 50312 - DNA, 498 bp, Mus musculus
  source 1..498: mol_type = other DNA
tgagcaactagggccacacactgctcttgcagggcacgtgattgaaataaattttatttttaatgaaagaaaaggtgtgggacttggtcactcatattacatctaagatcttgtttctactcataaaagagatagaaccaattctgccttcctttaccattaaggaaatggaggaagggttgggaaagagacctgtcctgagtcctgacctgactctcagtctcttattgacctgctgtgcaccactgatgcaccagaaggtgtcagggccccggattctcaggttccagagaccagatccgaagcacagaggtcggggttggggttcaaaagtccctccctcctgtaaggagaggactcctagctcgcggccctcctcggagacccccgggcgcatcctatccacggaggtcggactctgcccccgccccgccttccccctccccccgggggcggtggcccatggcgggtgctctcattggctgaggcgcaagcaag

SEQ ID NO: 50313 - DNA, 322 bp, Mus musculus
  source 1..322: mol_type = other DNA
ggcagtctgagctcggacgggcccttcattccttgaaggaccgcccttccgccctcaacacagtgagcagattctgggctttggagtcaagagtgtgtacgtacgaagtgcagcgacgcagaccgtcgtcagcccaggcgtcctgcctgccagtcctagacccgaccggggacggggagcgcgttcagcccgccgcctgctacaggacgcacgctgtacttaagggcgcatgcgcgggcggttaaaaacccgcatgcgaattactatggcttgggaactgtagttcaaatttcccatggtgccttggaactccagggctcgg

SEQ ID NO: 50314 - DNA, 237 bp, Mus musculus
  source 1..237: mol_type = other DNA
gttccgggtctggccctgccagaatgtagcctagggtagcccagacctcactgttcctagcccaggctggtccagaggattctttagcttcagcttccacagcaatataatcacgtattagctgaaacagtttccacttctcagatacagaaactgaggccctgagaggttgagtccccgatggtctcaccctgctgtcatgggaggatgggtggggcccactctccctctcgacct

SEQ ID NO: 50315 - DNA, 481 bp, Mus musculus
  source 1..481: mol_type = other DNA
tatcttaagggtttctattgctgccatgaaaacacacttccatgtttctgttaattattgaaggaagttctctttcttcattgatcactaattgagaaaatgttaacttgtgtcaagttgagggttggtgcccacacccatctcaaatccttccttctatctcttaattcttgaaaaaaaaaaaaaaaaaggcgccccttatctcgagtcaagggcatgtgtggggagtggcaggcacagtgccactttcccgggcaccgggccggcactgggcgcccgcagacccgcgagtggcggggagaacacctccagccgctgccgagtccccggctcccgcccgcggggcatcaacacaaaggtcctgcggcagcagctgtgccgcgctcctcctccccgaccagtccaaggtccgggccgcgcgtccattggcccggagctccaaggggcgtggtctcacactccgccctgccccgcggccacg

SEQ ID NO: 50316 - DNA, 378 bp, Mus musculus
  source 1..378: mol_type = other DNA
agaggaaagccggaaaactttgaggtatggagtctttgacttggccagtaaaattatttgatcctgagtcccacatattgtgaaagaatgaactattcatgtacttataggccttatatacgacccctacacagaaataagtgtgtgtgtgtgtgtgtgtggacctaaggcatacagatggtaaaattttctcagtccttttccttgttcttaggcctgaggcttagtaattaacaactttggaggcatttcagagttgctacaaggaactactcacagatgtggaattgactagtgttcccataagcagaggcagacttgctttctttttttctttcttgtcctaaaaaagcaagaattttgcatgaagattctatg

SEQ ID NO: 50317 - DNA, 272 bp, Mus musculus
  source 1..272: mol_type = other DNA
gagcgctgactgctcttctgacaagtccgtgtcctcttctggagtgtctgagacagctacagtgtacttacatataataaataaataaactcagaaactaaaggcaaatttctttccagtttgaagctaatggattctaattcacctccgagaggattttcagttcagaatgcagctgcagatgaaactgtactgtttctctgtgtagccctggctgtcctggactttgtagaccagtgtcacctatcttctgatgaacggcggactttgag

SEQ ID NO: 50318 - DNA, 846 bp, Mus musculus
  source 1..846: mol_type = other DNA
cccgggtgagaatcccggggccggttacgggccgtaaaacggcgccgcgccttgggctccttgtccactaccctcagccggagccccgcggccctgggctgcgctccgctgcctcacagaggagaccccggcgccccgctccagcagggctggcgggcgggcggccggcgcgcggggtgggtgctcctcggtggcggcgggcgggccgctccctgctccgcctcccgctccgcgagctgagccgagccgagccgccgggcgccgcgtccgctgccggagccccgacgacgacgccgaggaggcggaggcctcagcgccccgagcgcggccagccggtcacccgcccgcgcagcctcagcggtcgccgccgcagcccacacccgggcccgcaggctcgccgcggcccgcccggcctccagccttccgcgcccggtccgaggcggggctgactacgcggcccccgcccggccgccctccgcccccggccggcccgcggccccgcagccccggccccggcggcgggaggcgggccctgcggcggcggcggcggcggcggcagcggcggccgcagcgagcgaggaggccgcccggctcggcccgccgccgcccgcccgcctcggcgccgagattgggcgaatcgcgagcaagtacgtgcgcgtctccctgccgccgccgccgccgccgccgcccgccgcgggccgccccggggccgccgccgccgacgacgcgcgggtaggaagaggaggaggccgccccgccgccgccgccgccgccgcctctgctagcagccgcccgcccgccgggcccgcagcccgggcctccggccgcaggcgaggcccaggccgc

SEQ ID NO: 50319 - DNA, 585 bp, Mus musculus
  source 1..585: mol_type = other DNA
gatcctgcaggacttccatccagtacagatggcatacataagctgtcagctcagaggctgagaggtcccgtcaactgatcactctgagtgagcagtgcaggggcccgggtgccagcaattgcacatggggggcgggggcgggacgcggcggtcgcacgtgtcccgggagcgtgcatgggacaggtgccgggccgctactagcgctgggcgcactgtccgccaggcggccctggtgtccagctccgggaaatctcggtgagcgtccccaggtcgctcacacctccggagtgaccatgcacttgcaagcccgggaaaggcccccgcggggtgcggtcacccggcggagtcacgtgactctcagacggggtgcgggagcgaagcgagcaccgcgcaagcgcaatccaacgctgcgttcaggggccagcacgcggaacccgttgcggcgggccaatggggaaggtcgacggtgggcgcgccccaaccgcctcctgccggggaagcgccgctggccaagtgggcggcgctttccagtcagcatgggcgggggagggcggggcccggtcgccgcagaggcgtcgacgccgc

SEQ ID NO: 50320 - DNA, 241 bp, Mus musculus
  source 1..241: mol_type = other DNA
tgctgaatctatctttgagtcatggtttctttcatataggaatttaccctttaatagggaccagtttatcttttatgtagccctggctaacttggcaattgctatgtgcaaatattgggattatgaacaagagcacatgacatgttatttttttatatcctttagtatttggcagtttctgaatctcaagctcctaaggccttaacggaagcgctggaagctagcgcttgctttacgtaat

SEQ ID NO: 50321 - DNA, 345 bp, Mus musculus
  source 1..345: mol_type = other DNA
attgagatcacaacttggatcctctatatcaaacttctcaggcctggccaggcttgaaggaatctatcaactcagcctctccaggaggcaccgagtgtggcctttaggcctcaggacaaggtcccgccttccttttctatcataggaaactgaggggtcctgaccctgccaggagacttccagctccctcgaactttacagagtgctgctggacgcaaggggaggtggggggggggggggcgcccggcctcccgtggtcccgccccctggatcggcggctcctgacatcacgggcgggggctcggcagcccggagggcggaggacgccgcgcagtcccagcccgc

SEQ ID NO: 50322 - DNA, 393 bp, Mus musculus
  source 1..393: mol_type = other DNA
ctgctagcagaatattggcttctagacagctagaaaggctacattttactataatgttatttttattccctggctgtcctggaacactctgtagaccaggctggcctcgaacttagctaatgttcacctaggctggccttaaacccaccctttcccatattgccctgtgtgtcgtgagactctctgtctccagagcacatctggttatagtgatgagaaacactgttcttttcctcagtcccttctctgaactgagctatggccactgtggtatctggaatcactggccaatcgccatcccggttccaggattgtgtggagaaggtttcattagtagtaacttcccaaactgagctgagcgcctggcctgaaactcagggccaggcgactgag

SEQ ID NO: 50323 - DNA, 318 bp, Mus musculus
  source 1..318: mol_type = other DNA
agcattgcggaagccctgggcttaggctcttctcactgaggtcagcttgggtaccctgactcctgcaggcatgatcgacccagctgatcccacagggtggatcaagctctggaaaggcagattttgttgttccagaatgacagagggattaagccttcaatcccagtactcagagaatttgaggccagcctgatctgaaaccctgtctccaaaagaagccttcttttcttttctccttgagccacctaaacacacttctctttgttgactgcattttatttagacactaagtcacagaggccccgcggctcctagctc

SEQ ID NO: 50324 - DNA, 202 bp, Mus musculus
  source 1..202: mol_type = other DNA
agtatttttctaaatagcacagcaattttaagttgatcaggacctcatgcatgatagatcaagcacttgaaactgagtaaatattgacattgattgtacttttattagtagtactgcaaacgttcgttggcgttgcgcgtgcgcagtcctggtctggcgagacagttcccgcggccggggggtcagattggacctgcgaggc

SEQ ID NO: 50325 - DNA, 383 bp, Mus musculus
  source 1..383: mol_type = other DNA
tagcctgaaattacaggccaacattgccatgtcagtcagagtttgaaaaacacttcatcttcatctctgtgcagctctggcacagcctctagccagggcaggaaggaagggggtcaccaggagtcaggctaacaaagcaagactagcagctttggcttcctgtcactcagctctgtcccaggatggcagggagggatagattctgcgactctgttctgggccaggagaaggccagcaaggccttcacaggcaatcttctgcttcagatttccaagagtcacaggcttgcactactatgcctggcgcagaagagtttgcagagccagcaaactctgcttccaacctgagcgctcagctccagtccgcgactgcgcactgcacag

SEQ ID NO: 50326 - DNA, 378 bp, Mus musculus
  source 1..378: mol_type = other DNA
gttcagctaccttgtttattcagtccagattcctggcccacgtgacagggcttctctggaacattctgactgagtttctgggaggcgtacatgtggatctgcctgccagaaggctgagaagcgtatccacagaatcttctaagaacttttttgtaagacagtgttagctgagcagatgtgagccaccatgctggctccagagagcttcaaagcaatgacatgcccatcccttttaaatgggtagccaaaggtgtcggaactatgggctcatgtgctggggattgaacccaaggcatagacagagcaacgcttcttctctataaaaaaataaataagcagaaaggaaagcagaaatttccttactcttattggaaggaa

SEQ ID NO: 50327 - DNA, 324 bp, Mus musculus
  source 1..324: mol_type = other DNA
agatcagcagcttcgagaatccatttctctggaatttgttttcctcatctgtgaaaagggaatatactacattgaaacctaagtgtgacttagattaaaggcctttgtaagaattgagggcacccagaggcttcatggtgagaccctgggttttcagttgttgttgttttcaaaaacagatgtagagctacatctccgaagaatctgagcagatatatacttagaacaataagcagcgtaattgatttttttttcttactataccgtgaaaaagaaaacaacaaaagcgcattttaaagggggtaaactcccatggggcggagc

SEQ ID NO: 50328 - DNA, 597 bp, Mus musculus
  source 1..597: mol_type = other DNA
agtggaaaagttttcaataatgaccagaggaaacctctgaaagttcatcgtggttagctttacaatgctgctcacatctttacaaaatgttttaagactaatgtgcaaggacaaaccagaatgttactgattggttttgtcaacagaagcaatctgtcacacataaagtgcctctgtgactcagtttcctgaattgtaaaataaggttaataacagcatctacttcatatggttgtgagaattaaataattaatcacttaggataatgacaaatgataatgtactactcaatgctttttatttttaattcttattattgcgatattgaaggttgcatccataatgcataacccctttaaaaaatttttttaaagagttagacccatcaaaatggctcagctgttaagcaaatgctgacaagtctgaagatccgacttcaattctcagatctcaaatagtggaaggcgagaacagcgtgtgtgtgtgtgtgtgtgtgtgtgcgcgcgcgcgcgcgcgcacgcgcacgtaatactttccttgccaaattgccaagggtaagagctcgcggcggcggccgtaaagcgcggcggtcgaacg

SEQ ID NO: 50329 - DNA, 261 bp, Mus musculus
  source 1..261: mol_type = other DNA
agagatacactctgggcctatttcgtgtctgagcatatagaccacaacacacatgcagaggacaaggttagtgtctgtccttactataccaggcaggctgatcttgcaaaactgagggattcaaactctggtccccacacttgcacccttccccccattatgtagtggggggttacctaggtaactgtttgtggtttctggaacagagaatccagattgaagaaatccttgaattgtgaagtcaaagacttctgggatgtg

SEQ ID NO: 50330 - DNA, 314 bp, Mus musculus
  source 1..314: mol_type = other DNA
gcagagcttgatgacttgaattcaacccctaacatagtagaagaagaaaaccatttcattttcttttcttttttaaagcactgttgctgtcttcagacacaccagaagagggaatcggattccattacagatggtagagcagtcagtgctcttaatcaccatgttgtgacatatgtatgaacacacacatatacacacacgtctgtgactctgtgtgaaaggggctggggccacaccactcaaaaatcttccacccttgggctggcagctttgaagggcaaagtagcactcttcattaaaaccgaaagtttcac

SEQ ID NO: 50331 - DNA, 633 bp, Mus musculus
  source 1..633: mol_type = other DNA
gagggcggcggccccacaggtctctaggactagctggtcgagattgccaaggccttcgggtcctgggcaggaaggaccctggcagggaggagctgcttggggagcacagggtccagggggaggaggcgtgtcagccccgcgctagcatcccacacggcgggctgcgatttgggcctgcctggtcctgatgcaggggcgggcagcagcagagagaactgcggccgtggcagcggcacggctcccagccccggagcatgcgcgacagccgccccggagcccccagccgcggctccccgcgtcctgccgccaggtgagccaaggcagctgcgagggagctgggagcagagcccggcaggactaacctcgcagactgtatggcagggtcgaggatgccacgcctctggcgcccccccacccccgccccggctcccccaggaggcccctcgctcgagcggggcgccgtcagccccggccctgagccctgatcctccgcccgggttccagtccccggcgtggccagtaggcggcagccgcgaggcgactagccaccagcggggacggccgggagtcgggcccctctccacgcccccttctccacgcgcgcggggaggcagggctccaccgccagtctgg

SEQ ID NO: 50332 - DNA, 421 bp, Mus musculus
  source 1..421: mol_type = other DNA
tcggggccccttgtacaggaccaaaagccccgcccggggcctcagtttctccggctgccctgggaacccagcccaaccccgcccggtttccgaggaactaggccgggagcgggggcgcccctcccgcaccgccttaggcttcctgaagcctctgcggtcaggccaccgcttcctgggaagcccaagccaaggccaggccgaatggccaacgggaggggcccgcacgcggctctggaggagggcggcggccccacaggtctctaggactagctggtcgagattgccaaggccttcgggtcctgggcaggaaggaccctggcagggaggagctgcttggggagcacagggtccagggggaggaggcgtgtcagccccgcgctagcatcccacacggcgggctgcgatttgggcctgcctggtc

SEQ ID NO: 50333 - DNA, 330 bp, Mus musculus
  source 1..330: mol_type = other DNA
caacggcatgtttatttaaaagtgaacttagaactgggttgagctgagaccatctcagcaggtaagagaaaccactcctaagagttgtcttcgaatgtaaggccaggcagcattgcctcctttctagtaaaataccacgaccttgtcttttccaagcccatgggatacccaagatcaggcttcagttaccgacccttaacttcccagctgctggggtacccaatcagggcacagtgtctcgctacccacggccaggcactacactggcgttgatgtcaccgtgcagatctgagatgtgggctcagctgagaggcagggctttgtcatacc

SEQ ID NO: 50334 - DNA, 242 bp, Mus musculus
  source 1..242: mol_type = other DNA
gcggaggagacactcctgccgccacaggaggcggcatcccacagccgaccccctggccacctgtgctgctgctgccttccaggcagcctattctacaggctgcagtgcctggggaagtcacttgcccaagggagccctgagctgccaaggagccgggccttagggaaggggccatggatagaattggccaaatccaagcctggactgagaccatcttcccagcacatgtcagtgccacaccc

SEQ ID NO: 50335 - DNA, 399 bp, Mus musculus
  source 1..399: mol_type = other DNA
caatggcatgtgcctaagaactggacaatgcactctacaactagtttagatcttatttaagctagcactactaactgctcattgtcctgtgacaggctcagattcaagaattatgagggactacctggttagcctaagatccaagataggaagttaagaagttaagaagcgcttatctgtgcctcagtttcccccatgggaagatatgttacacctcgaatgcccaaccaaggccatgcatgggctgcatctccaacactgcatgtccagggcatggaagcacacatatgtgattccaacccctggggtgtgaggccatctcacattcaataagtcagcatgcttcaaagcaagacaaaccctgtgccgccctcacagaggggactggatatatgagcc

SEQ ID NO: 50336 - DNA, 360 bp, Mus musculus
  source 1..360: mol_type = other DNA
tcgaggccagcctggtctacagagtgagatccaggataaccagggctatacagagaaaccctgtctttgaccagatgccaagtctaatatctctcaggctgggagcaggggccagtagcagcacccacgtccaccggctcccatttatacctgaagcacttgatggggcctcactgagcagtctgaagatgtgtgctttagttcaaatcacttaacacctaagctgagtgactaactgaacactcaagtggtctttgtcacttcttgactgtgacacaagccatggtacaggtcctcactggccatggtctgtgaggtcctggtcctctttgacttcataattcctaggggccactagta

SEQ ID NO: 50337 - DNA, 248 bp, Mus musculus
  source 1..248: mol_type = other DNA
tcatagccatgaagtattatgcctagctatttttaaaacacaggtctttgtgttttcaagacaaacatatgagagggtctatatagcccagcctggccttgaccctccagagatctcgagaaagtgttacttattcagggaagctaaggtgctattagatgctggcagctgaggcagggctcctacctgtcctgtgtgctctgtgcacttgtctcaggtggacgctggcagccgtcagagggaggcct

SEQ ID NO: 50338 - DNA, 458 bp, Mus musculus
  source 1..458: mol_type = other DNA
gggagttaattctcacatgggttttgggaatggaactctgatctgatatcagatttggtggcaagtgattgagcattcttgctagaactgaaagaggaaattgtttaatttacttgggactccaattcactctgtggctaaagatgaccttgaactcatcttccagccctaaataggtgtgaaccaccaaaatttgttttgatacttttttaatcgttaaattcaaataagtgtatttattttctttttaaagatttcccctgataaaactcttataatttcaggaatactgttgatatcttattcataaatttgtctcttaaaattaatcgatcatctacaggaacggagacatatggcctcttccttaggagaggaaattccgtatcattcacgcccccatccattggctgcctcgggcaggcgcgctcttgattggctgccgctcgccaaacccc

SEQ ID NO: 50339 - DNA, 295 bp, Mus musculus
  source 1..295: mol_type = other DNA
tgctcacattaaagcaaggggataaaatgtaagccatgcatggtaacatacacttttctacacagtgaaacactactgtgagcttgtgtgcgctcacgtgtgcgtgcacccccccaccacattttttttgagaaactaacagctgaactgcagtaaaggaactgttttagatcaggccgatctttgttcatcatataattttattcaaattataaactttcatcagctacataacatacaaatgttgtctgttagaaacaaaccggctcgccctgcctccccggagccctcccgg

SEQ ID NO: 50340 - DNA, 590 bp, Mus musculus
  source 1..590: mol_type = other DNA
cgagaggactggacactaatgacaagcgtcccagcagctcccgcgtgctgagcgcgggcggtgtgcaggcgcggtgccaggcgacgccgcgtctctcccactctatcgaaggagcaagtcagggggcgacagctgaggaggaaacgacagctgaagctggggggggggtcccagagacccattcgggaccaaacgctgcggctcagcctcagtctcggggcgctgccaggaacccccgtgagtgttccgggcagcccggaggatccgcgcaggaggagaggggcagatgcccagccaagcagcctccgccccccgctctcctttgtcccaatcccgcggcggaggacaaagagcccccgcccgcgcgcggcatctgccgcgccgacccgccagcgccgcaccccgatagcagcagccccgccgccccggctccgcctgcgcgccagccgggtcggccgcggagccctcgccagacgccagagcccgatcagcagggggcgaggtgcttgggctccgccctgattggcggggcgctctggtgcgaccaactggagatcgcgctcgtgcgctctgggcccggaggcgcacaa

SEQ ID NO: 50341 - DNA, 219 bp, Mus musculus
  source 1..219: mol_type = other DNA
agggggatatccccttgggcctcagaggtcttcaaactctttgtggagttcctggtggccatcagagtattttaagtcttctggagtacttggtgaaggcttaactaagcccagctccgggagcttgtgcgcctccgggcccagagcgcacgagcgcgatctccagttggtcgcaccagagcgccccgccaatcagggcggagcccaagcacctcgccc

SEQ ID NO: 50342 - DNA, 399 bp, Mus musculus
  source 1..399: mol_type = other DNA
taattaccacttatcagtacttgtctcaaggtttctactgttgtaataaacacatgaacaataccatcattgaaggaagtcatgtcaacagtgttcaagcctgcgcagagtcgacgcggccgcgagtgctgcgagcacccgcgcagactccatgggctcgagggcgtggcccccaaagggcgtggcttcgcgggaagccggcattcgcgcaggctccgagtcggagggcgcgaggtccgggagtgacgtgcggggccgggtccccgggcccgaggtggcggcaaatgcggaggccgcggcggcggcggcgggaacaacagcgaggacgccgaggacgagggtggcggccccaagggctcaggctccctcagccctgccggggcggcggcgtccttggag

SEQ ID NO: 50343 - DNA, 313 bp, Mus musculus
  source 1..313: mol_type = other DNA
cacagttgtgtgccactaagcctggtttaaaaaattatacacaactcatataaacctaattaaatgggattacacaattacattaattaccacttatcagtacttgtctcaaggtttctactgttgtaataaacacatgaacaataccatcattgaaggaagtcatgtcaacagtgttcaagcctgcgcagagtcgacgcggccgcgagtgctgcgagcacccgcgcagactccatgggctcgagggcgtggcccccaaagggcgtggcttcgcgggaagccggcattcgcgcaggctccgagtcggagggcg

SEQ ID NO: 50344 - DNA, 280 bp, Mus musculus
  source 1..280: mol_type = other DNA
ggcaaaggccatgggtgtaagactgttgcccttacacacatgtgtcacactagcacctaaattggttcaaagaagttttgttgtcaccttttttctatagggtatctttggcagttcttgtaaacagtttaaaagatctctgtggcacgtggaactgtcagagtcagagagccatctccaaccttttcagagatggattatcatagcttttatctgtatgagagaagcagtggtggaggccagcctggtctacagagtgagttccaggacagccagggct

SEQ ID NO: 50345 - DNA, 336 bp, Mus musculus
  source 1..336: mol_type = other DNA
taaaactgcaaattagaccttgtaatttccatctcagacactgaattccaaattttgtctggggtaatgtacacctgaccactgaaacacagagcttgtgttggctctgagatttgcaaaaataccgcattttgttttcaagatgataaaaacagtgacgaaagcctgtcattcatttgaaagtccatcctactttggtatccagagcctatcgccgccgcttccgcagccccgaggccccgacgtggcgcctccaaccccgggctgacactggcaacgcagccaatggtagcgtttgcggggcggcgcgcgaggcctcccgccgccagagggcgc

SEQ ID NO: 50346 - DNA, 356 bp, Mus musculus
  source 1..356: mol_type = other DNA
ttcacataaaaatttctaaataaattatgtaactgtggtcagacctgtctagagttccagaatagccagaattgccataatagagaccctgtctcaataatagagaccctgtctcaataatactctgtctcaatagaggctctgtgaatacggggtattgggcacggtcaccacagtgggcatggtcttacctgagagtatttcctgggaataccaccaatttggggaacgctctagcacgggattgaagagagggctttagtctctccttagggcgctcgctcggtgtcctccggaaggagcgactcaggcctgcagcctagaataactctggggcccaacatctaatttcgcgc

SEQ ID NO: 50347 - DNA, 347 bp, Mus musculus
  source 1..347: mol_type = other DNA
actgcctttctaatctgcagagacagagaataagttaattttctcaatctatgtttggccaacctggaatacagtccagaaaggcgtgcgccacaaagcctggcgctcctcttacaatttgtacccattgtccaaaatctgtttacaggttgtcctttctacgtaagaggactattcggaagcttctcctgcccttgcacggacacatgacctgtgatgctcgagcccgctgggtgcgttcccagaggccagcctcgagctccggagagcccacgcggtcgcgggcccactcggggtcacttgcacgtcggtggtggtcgcctcagcgaccgaggcactgcgagccc

SEQ ID NO: 50348 - DNA, 347 bp, Mus musculus
  source 1..347: mol_type = other DNA
aaaaaacattttaggtgcgggcttttaatgactagtcaaacataacatgagtcactgaaattttccagttaaggatccgcagtttcagctgtaacatctcatggttttactgctcgtgcggaagggctcggcccaccgtcttgccctagcgcctgccgggagttccagccgctcttgagcgctgaaagcccccgagaaaaccgcaccgggtcttcgcgggtccgctgtcgacctggtctcgagtgtactgtctggactgtagctgctgcccaggacgccggcgagtgagtcattgactgtcaggtcctccccgggtcagcgcggcctgctcctccccggtcggccgc

SEQ ID NO: 50349 - DNA, 346 bp, Mus musculus
  source 1..346: mol_type = other DNA
gtatttagaacaggtattcctacttcgtgcagtaaaaaataaaggtgaattttattttttcttgcttgtcacttactaaaaacttgaaagtgtgagatgccctcattattaaaggactgtaagaaaaaaaacattttaggtgcgggcttttaatgactagtcaaacataacatgagtcactgaaattttccagttaaggatccgcagtttcagctgtaacatctcatggttttactgctcgtgcggaagggctcggcccaccgtcttgccctagcgcctgccgggagttccagccgctcttgagcgctgaaagcccccgagaaaaccgcaccgggtcttcgcgggt

SEQ ID NO: 50350 - DNA, 472 bp, Mus musculus
  source 1..472: mol_type = other DNA
tctcactttttattatacaaatgtttaaagtcagcattccaatttagatatcttagatccagatttaaaaaaaaaaaaaactcgttgtttgaacattttgaatatgttactctgtaatttccaagtaggttagttgcattctgtctagactcttttcagagcaagtaaaattaagagtatacttttctttgtcttgggtatttagaacaggtattcctacttcgtgcagtaaaaaataaaggtgaattttattttttcttgcttgtcacttactaaaaacttgaaagtgtgagatgccctcattattaaaggactgtaagaaaaaaaacattttaggtgcgggcttttaatgactagtcaaacataacatgagtcactgaaattttccagttaaggatccgcagtttcagctgtaacatctcatggttttactgctcgtgcggaagggctcggcccaccgtcttgccctagc

SEQ ID NO: 50351 - DNA, 243 bp, Mus musculus
  source 1..243: mol_type = other DNA
ggccagcctgatctgcagtgttccagaacagcagcctgctgtctcaaaaactaaaacaaatatatatatgtgtgtgtgtgtgtatgtatatattatcattattattattattattttgttttgagaaggcatgactccctgacactcaagcttgaatccccacatgcctctgcctccagagggttgggagtgaagcttgcatccccatgccagctaggaaaactgtctcttgtctcatgatac

SEQ ID NO: 50352 - DNA, 283 bp, Mus musculus
  source 1..283: mol_type = other DNA
tgaagtgaagtttcaaattctgactgcatcagtagtttcgagagtcttgagaagttatcctgcatgcaaggcatgagccctggctgtcctgcatttgtagaccaggctggcctcgaactcagaaatccgggattaaaggcgtgcgttaccacgccggccatccaagcctgtaccaccaggccctgcaggattgagtagttcaaggttgacgtgctggtttgacggaggagagtcactgcttccggggcggggccagcgggcggggcgcgcgttctcccggcct

SEQ ID NO: 50353 - DNA, 339 bp, Mus musculus
  source 1..339: mol_type = other DNA
gctcgttcttccagctggagcaattctctcggaagaaggatcaggaggagactcctctccaagctcttggagagctcggttatctgatacatcctgatattcacagcagtgtaaacactaaaatgtaccccataggatgccatgcatgccagcttaccctgtgctgtgttagtatgtactccataaccactccatgcacactggttttgaaaccctccatctgtaagatctcttacccactgaggtgtgtcagagttgctacacctttgactggtaccacaggtacctgcccagggctcaggctcttggcttttgtttgctgtctgctaatatcagctt

SEQ ID NO: 50354 - DNA, 493 bp, Mus musculus
  source 1..493: mol_type = other DNA
caagctcatttgtatttctgtcctaaattgctaggacttatatctgactctagttcagaaaatttagcaacttggcagatcctaggaattccccgagatctgaatttaacattttccacctcgaaatctggattgctaagtgtcagtttccccatctgagtgacagaatgacagtggcaatgtcagtcaagatgccttaaagactcttgagattatggtaggacatcaaattgaaatggaatttcagataaacaatattttaaaaataactgcttaagtatctcccaaatactgcatgagatatatttaagctaaattcctattcttgttaacctgaaatcccaaattatgatcctgaccccgggaggatcccactaggggtggcaatctccgtgttctgcccaggcagtactagcagcacccagagcggccccgccccgcccggccctcctggagggcaggttccagaagctgttccaggcggggctgccgg

SEQ ID NO: 50355 - DNA, 390 bp, Mus musculus
  source 1..390: mol_type = other DNA
ggacagcctgctctggagactgtcgcgcgggctgcagacccaggccttgcgctgcgccaaaactgccagcgcagaggcggcgccgctgtgtgccctcctgtggagctcagcgttcgctgcgggggcgaagagagggctaggggagttcttaggagagcccttcccctgttctggggtgcttaccacagcccaaggggtttggactcgaaccatcccaggctcgcgccaggcatgaggtcgcatccccggaaagggaggcagttcctgcacgcccgggaggagatcgcagctcctgcgcacgcacccctaggggggggaggagcacctttctccccgagagggtgccagaggtcccggccttccacctgccgagaaatcagagctgttctt

SEQ ID NO: 50356 - DNA, 541 bp, Mus musculus
  source 1..541: mol_type = other DNA
ttctcccagagacagaaggcgaggaatgtcttttttttttttaattgcttcatactaaaaaccattaaaaggtatattctagaattttcaatggttcatcaacagatactaacactaggtgttggttgcctggctgaaacagcctacaattaaatgagaattgttacatgactgaatttaattctggaccttgacccagctgtgtgtgctgtagccacacaggctgctatgggagaagcccagagtctgtctcttagatgttagctttgtaacataaccaagccttagaaaagattataaaggtagatttgtagatgtacaaataatttgcctaagagctcaaatctagtgcagacttgtgtattttaaagccatagactattattaagctttacattcaatcaagggagcttttaacacagccataatggatcccttcataacctatgaaatgggcattctgccacattcagatgaattcagaagaggcccttcagtgggttttatgatgtcatagatgaaaacacacagttccttctgt

SEQ ID NO: 50357 - DNA, 381 bp, Mus musculus
  source 1..381: mol_type = other DNA
gccctcctgttctggggtgcttaccacagcccaaggggtttggactcgaaccatcccaggctcgcgccaggcatgaggtcgcatccccggaaagggaggcagttcctgcacgcccgggaggagatcgcagctcctgcgcacgcacccctaggggggggaggagcacctttctccccgagagggtgccagaggtcccggccttccacctgccgagaaatcagagctgttctttctctctctccagcgcacttggcgtgctagagaggtgaagcgcctcccccggtggccagcaggacctgcaccccgcgctggcccccgctcctgctccgtccccgcccggccccggcgcgctcctccccggccggcccccttcctcggcgc

SEQ ID NO: 50358 - DNA, 386 bp, Mus musculus
  source 1..386: mol_type = other DNA
taatcgtccattcgagaaacgtaccttgagggagatttagggaaaatttgtgacggaactcaggatctaccactaagttacatcatctctagctcaggctgagatagcctgtccacctggagaaaccaaaaatctggtttcgaatcttggttgtttattatttcatataattaagcagggttaaccatggttattcctgagtaatggaacaatcctattttgccttcatttgtatttcgtatgggctgaaaatatgcctggaggtttttttaggtagttacaaacacgacccaaatgtcctgcaactaacttactgagttcaagacctttgcaaacgattctggatgcacttggaatactgacagcaacattcacctaaacacacg

SEQ ID NO: 50359 - DNA, 379 bp, Mus musculus
  source 1..379: mol_type = other DNA
catctctagctcaggctgagatagcctgtccacctggagaaaccaaaaatctggtttcgaatcttggttgtttattatttcatataattaagcagggttaaccatggttattcctgagtaatggaacaatcctattttgccttcatttgtatttcgtatgggctgaaaatatgcctggaggtttttttaggtagttacaaacacgacccaaatgtcctgcaactaacttactgagttcaagacctttgcaaacgattctggatgcacttggaatactgacagcaacattcacctaaacacacgcgcgcgcacgcgcgctaacgctttctgcgtagacctgccctgggctcgggcacattccggccacacttcagcgttc

SEQ ID NO: 50360 - DNA, 360 bp, Mus musculus
  source 1..360: mol_type = other DNA
gctccttagaagcaatccccaaccataaagttattttgctgttatgaatcaatgtaaatgatacacagaatctgatatgttgcaacagaccccctattggggtcacttcttccactcggaagaacaacgcaccgactccacaggccggtctgctcgtccgctgcaacctccttctggaatgtgggagcagccagagcttaggcagcaacagagctcccagctccgcagcccagctgcgcatgcgccccggggcagccaggtgagagcgcggcgggagcgggcggcctcgcaccttccgggagtcggctcggcgctacctggagcttccaggacgggctccgtgccttcagacgggaggag

SEQ ID NO: 50361 - DNA, 395 bp, Mus musculus
  source 1..395: mol_type = other DNA
ccaggggctcgtgggtcaagccatatagcctcaggttcgctccacatgataataatgcccagacgcctggaggctgcaccagagttctagggccacccgaagtaccccaagaggctgccttaggccgggtcttctctgagatggcctagtgtgatgtatcacattactaaagacaccccagggcgccagctgacctggtgggcaccttcagatcacttgttctccctactgatcagtgaggaccaggaatgaaagggggcccggcccctgtgatgatcgaggcatgatcaagtctggagcctgggctcaggtatctgtatggaagcttccgcctagggacacatgcagccagttgctgtacagatgctgaggttcctcggagactgtgcctggca

SEQ ID NO: 50362 - DNA, 367 bp, Mus musculus
  source 1..367: mol_type = other DNA
gagtctttcacgtacaggagcgacgctcttgtcactcacactgagagcctcattgatgtgacaggagctgtattgtcattattactaccactcagtcgctgtctgacaagaagtctggaagacaccgagttacggttggcaatccccctggtcaaccagagaaccaacaggtttgttgtttttttactccatctgttttgattcaactataagggatagtttctagaacattctagactggcacactggagctaagcttagcttccccggatagtgaaggctaatgaggctcctgcccagccgggcgccctggggagagcctcctatctggaacagaaaatactccaaatatttccttcccttccag

SEQ ID NO: 50363 - DNA, 450 bp, Mus musculus
  source 1..450: mol_type = other DNA
tagcaactatcatgtttccaagtagcaagtctgggacaaccaccatgatttgtcatcacagtgtctctcttctaccagagtggcatagaaccggaactcagtcaatcccagtgttgggagtcagagactggcattttaggcgccactccggctgaaacaagttcagtcagtgagagagaccctgtctcaaaagaacagccacgggaggtccttctttgcttactactagtaattaagcaagaattatatatttgtatatataaaattaatttaaaaatttttagacagactctcatctggaattatagacccagggtatgtctcttgatcaaccaggttcaggacaggaaacttctccaacatatgggccaggccttgagactttgatagcaatgccctaggcagcccggagggcccgggctccgcccctaacgtgacacagatctgacg

SEQ ID NO: 50364 - DNA, 424 bp, Mus musculus
  source 1..424: mol_type = other DNA
aagcaagagatgttaaaattttgaaagatcaaatcaatgattgtccaattaaagcaagctgtatttggggggttgtctcctcctaaatcgggttttgagagagcagcctctgaagatttaaacagcctggtctacaaagtgagttccaggacagccagggctatacagagaaagttggctattaacacgtttttatatttattaaatcagaactgagaaacaggaactttttctttctttggttaaatagtaccattgagttctcaacagatctagcggagtaaatgtgataacgccattttaccccaaattaaataaaactttaaggactgcttctgtggttttcttcataaatgtgaagttaagatctgaataaagctagctaaatacggccagctgggggtcgcgttggtgcgcatgcgcc

SEQ ID NO: 50365 - DNA, 135 bp, Mus musculus
  source 1..135: mol_type = other DNA
atagaatcatgttttcatggaaaaagttctatctatggaagcatacactgctggcatgcactgggttccagaagtgagaggccagcctgggtgcttttagaggctaagactgcccatggcaacataagttaggca

SEQ ID NO: 50366 - DNA, 202 bp, Mus musculus
  source 1..202: mol_type = other DNA
cagatcagatatgaaatctaaacaacaaaaattattgaccaattgaatagtgctagtctggcaaaaagcaataatgtgtcccaattatcatgccttttcagtatgaaaagtaggcatcgcagactttttattagaaatggcgttgtaaaatgttacagtaaattaactttttggaactaatctgcagaagtcagagacagtc

SEQ ID NO: 50367 - DNA, 482 bp, Mus musculus
  source 1..482: mol_type = other DNA
tacaaagtgcaggccttcaaaggcatcttctgctctgaaggccaggcccactgtggctggggcctgtggctttggagctggttgtccttgaacagcagctctcctcaggaggcctcttcatgatgccctcaatgatgcgcttgagtgccaacaccaagcttgactccttggcctcagtgaagatggtggtcttcttagaaacacagccatccctgtggctgcttctaatctgatggcttctcaggttgtcctgttgtttgaaaaccaaaaaagagaaagcacccacgcctctaagacaagcttctttttgaaggagtttctgagcggccaccgattgccccgccaagctgtgccagcctatttctaggaaagcttcaggccggttaaggtcagacgcaagcctacccgccttctgctcacgtgggccgcgtcccgcaaggggctgccttctgcagcgccacttccggggcggggcttccggc

SEQ ID NO: 50368 - DNA, 225 bp, Mus musculus
  source 1..225: mol_type = other DNA
gcgggcccatgtcaaggtatccccctacctggcgggcagcgggcaatgacacagcgcttacgcccccgcggtgctagctggggccgcaagcgcgaggctaccctcgagctacagctgctggcaccagcatgccttgcagccccacatccgggccgagtccgcggtgggcgcggcgcccacggtgggcgtggcatgccccgaggcggggcgaagcggagcggggcg

SEQ ID NO: 50369 - DNA, 536 bp, Mus musculus
  source 1..536: mol_type = other DNA
attctcactcagaaagaggaacccaaacgtagtgagaccagctgggaccacctcctccaatttgttgcaggggcctccgcgtcaccctacaggaccagcgcgggttcaggccgggtcctacgccgagcctcggtaaagccaaagccggctccgacagcgccgggcccacctcccctcagccaccgggccccgtgacgtggcccggcccggcccggcccggccgccctcctccaacgagactccttagtcctacggggaaaccagtcgccccggtggcgaagacccgggaccacagcgccgcccgctcagggacgcgtccatggctgaggcgtccggtgctgggcccgcggtgctgggcactacttccgcctcccgcggcccgcagcggtttccacgctggcagcgctgacgtcctccccgcccgcagccggcggggcggagaggaggaggagctgccccgcagcgcggcccgcaggtatcctgcggcttgctgaaggcggggctaggcccgtcgggtgggcggggcctcccggggc

SEQ ID NO: 50370 - DNA, 268 bp, Mus musculus
  source 1..268: mol_type = other DNA
gaaaggaaaaaaaaaaaaaaggcactatttcatcactttttttttttttttccagtctggagagtcattgctaggaaatgccgacccaacctgggggtttgggggagcgaccacaatggtggtaagtccgcactacccccacctagcgggtgtgaaggacctccatatcaaatttctgctctgatataaaatggaaatatcaccgcgcatgcgcaagggtccggtgttgagactagaaggccccgccccgggaggccccgcccacccg

SEQ ID NO: 50371 - DNA, 319 bp, Mus musculus
  source 1..319: mol_type = other DNA
ccgacccaacctgggggtttgggggagcgaccacaatggtggtaagtccgcactacccccacctagcgggtgtgaaggacctccatatcaaatttctgctctgatataaaatggaaatatcaccgcgcatgcgcaagggtccggtgttgagactagaaggccccgccccgggaggccccgcccacccgacgggcctagccccgccttcagcaagccgcaggatacctgcgggccgcgctgcggggcagctcctcctcctctccgccccgccggctgcgggcggggaggacgtcagcgctgccagcgtggaaaccgctgc

SEQ ID NO: 50372 - DNA, 254 bp, Mus musculus
  source 1..254: mol_type = other DNA
tctccacacccccaacacacagagagagaggggggggggagctcttccactcacatggcagctaatgatggtatgtaactttgtgggcacttagtatggtaagctatacacataaagtaaaatttaatgaatatttaaaaataaatagaaaatatctttttaaaggtactagattttttaaaaaaataaaaactacagctcctggaaatttcatggaaagggaggtccaatcgctctggcgcttgaaatgcatg

SEQ ID NO: 50373 - DNA, 157 bp, Mus musculus
  source 1..157: mol_type = other DNA
gtttctctgtatagccctggctgtcctggactcactttgtagaccaggctggcctcgaactcagaaatccgcctgcctgagtgctggaaaggcgcatggatgtaaagatcagtgttctgaactcctttccatacaaatgcacaggattgacacaggt

SEQ ID NO: 50374 - DNA, 515 bp, Mus musculus
  source 1..515: mol_type = other DNA
ttaagtacatgtagctcaatgtaagcctagagaccaggtctgctgggcaagccatacctggaagctcctagagtcagggacatcaatgaccttagactttccagatagcctccactagtttcaagtattgtgtccaacaaattgaaagcaaaagtcttggattcatttacagatgtttgttgataccaaaacagctttgcacagcgctaacccatctctcctctgacccaagaggaggtgggacaatgctggaatttcagctatgctctgaacctcaaggctgacccccatttctgtatgtggggagcgttcctcctcctgggatgcaggaaagacggtccttctccggctgccggatctcggatccagtacagctggactccggagcctcccagtacagcccagccctggagggtcccctctacactggaagcccagctgcgggggcgcttcccgtctgccagcctgcgttccggtctgctctagggggccccagttcagcacgcgagtcccca

SEQ ID NO: 50375 - DNA, 181 bp, Mus musculus
  source 1..181: mol_type = other DNA
tttccttgtatgcaaaacacattaaggtgcacggccccttcagaccagctacgttgctgatcagagcatccggtacgccctagtggagtcccggcactgacagaggacccgccgccgccggcctccgcgtatttctccgcgcagggcacgctgggaagtggggggggcggggcctcgcggc

SEQ ID NO: 50376 - DNA, 337 bp, Mus musculus
  source 1..337: mol_type = other DNA
atcccagaagactcacgctgtagaccaggctggtctcaaactcagaaatccaaagcactgcacaaagtcttcgagtaattaaataccttgtttcaaacaaagtcaagttctttcacattaaactattctgtctcagaagaagccacaacagttaaagattctatttcttgggcaagagccggcgagtaccgagccgccagcaggccctctccacgcccgccttccgggccagtggcctgcgcctcctgcggcccctcccgcccccaccgaggcttggcccagccgcgcccgggcctagagagaggccgagtcagacgcgtcccgagagcggcagcca

SEQ ID NO: 50377 - DNA, 251 bp, Mus musculus
  source 1..251: mol_type = other DNA
actgtgtaaggatatcatgtactcttaactgttgactttgccaaaagcccatttggcaggtaagatgcagtgcaacgtgcacgatttaatttgtaaaaataagggttatcacgtgacgaggcagagcattaatactttatttcacaagaccttttagagcggaaccctaggtgcctgacgaggctgcagggccgcgaggccccgccccccccacttcccagcgtgccctgcgcggagaaatacgcggaggc

SEQ ID NO: 50378 - DNA, 223 bp, Mus musculus
  source 1..223: mol_type = other DNA
tgcgggggaccagcaagtagtagaaagaacaagttaggaaaaacaagtttccctttcttttcccacacattcagtcactggaggatatgcggtgtgcaccctcagatctaagaggcttttctgtaaggacccaggatctgaggctgtgggtcagtgcggctctgttcctcacctgcagggggcgccgcgaagggaagaggatcctcccactctcggacgtccg

SEQ ID NO: 50379 - DNA, 193 bp, Mus musculus
  source 1..193: mol_type = other DNA
tgacaaacacccaatgatttcttttaaagtctatattttctattttaagggtccagtgtcttagactccctggagagtcctcagaaagacccaagggtgggtcagagcagtctgttctaaccagtcttttgtgtctgggactcggactgagcacaaaagcagttgggtacagatttggctctggctccaagct

SEQ ID NO: 50380 - DNA, 564 bp, Mus musculus
  source 1..564: mol_type = other DNA
cattttctttattactttttaaattaaaatattttttcaggggtattttgttgtcagcgccccaggtggctggggtaataagaaggatgcacacctttaatcccagagcttgggagacagaggcaggcagatctctgagttcgaggccagcctggtttacaaattgagttccaggacagccagggattcagtctggtcattcatcctctactacatagtgctttagaggccagatttagttattatatgaaaccctgtccccaaattcctcataccaagtaataaggaaatgagttatttcctggctgcactcattagaatggattcatagggctcctgattcaaacgaactacacttctactcgttgagggactctgagcgaatttcttctcccgcagcggggggccagcagcccaggtgtctttaggagccgccagtgagtgggagctgcagacgaggcctgcaggcccaggccagggcaactcgtggccgtgctcgctcccacgcgcggggcggggcggggtggggcggggctgcatcccggtgacgcgggccaaccgcgc

SEQ ID NO: 50381 - DNA, 274 bp, Mus musculus
  source 1..274: mol_type = other DNA
ctaaataaactctattttatacaaaacaacaaaaagagtatgtatctttaattaacgaacttaaaatatgacattggccttttgcaaatttgacttttctgagtaacacagttcacctgaatcgagaaatttccaacatggcaaacaatacagtctgcaaagtgtcaggctgaaacgctgcaactgggactaaatgcaggcacagtgtctgtgctgggcagtcaggactggcaggctttactgagcccctgaatggccacttagggccgcaaat

SEQ ID NO: 50382 - DNA, 461 bp, Mus musculus
  source 1..461: mol_type = other DNA
ttgcctgtgggcacagtgaaaactgcacttttaaaatgaatcacttcggagtatttttacacctacccctatgtgcaaatgcaagtagtgaccggctggctactggactacctaaactgccagtcaaagaacttggcaaaagaatcctttaccccatcttttaagcagacactaagaattgtcagtagagattcatatttttttttctttctagcagcgatcagcaagttaacgccgtggcagctaggggctgcgcggtcccagtccggagggccgcccttccttcccgccctcgcctggggtcacctagcggaaacacgtttccccagtgctcaagaaccgagatttcctttcttgaaaacatttaatgtattttgagcagaaaaatttagtctgacaacagagtcttcctctattcacagctgttccagaaggaggagctgaaatctgaacgaaggcgc

SEQ ID NO: 50383 - DNA, 338 bp, Mus musculus
  source 1..338: mol_type = other DNA
gtgcatgcttgctttaaagccctagaaccattatcggggaagaagcaaggtggtaagctgctttttttggttctggtgtcatcagagcaaaactacagcctttattaattgtagaccaggctggcctcgaactcagaaatccgcctgccttgcttgcgccaccacgcccgtgtttagacattatttcaatatttaataagaggagtcatagggaaaatttcccttggacacactgacactattggagatctcagatcttttaaagactttttaagctcatgctgccttgaacaggtcggtccctctatgacggagagcaacgcgctgccggaagtgac

SEQ ID NO: 50384 - DNA, 500 bp, Mus musculus
  source 1..500: mol_type = other DNA
gaaaaaaggatttttgtcaaggtcctattgagttcaagcgagtttattctggaagaaaatacttccatcttgcactctcatccaactttggataaaaatgactaccaaacttggtggtcattttccaacacctgttttaaagcatcttcctcagatactaggaagaggctgagccctgcgtctatgcactgcagagctagtgcttaactggccccggcagcactgcagcggtctgctgcggacaggaactcctgcagctgcagtagccaacaccgcatgcgcgagcactctagccagctcttccctgaaggcccagccggaactgcggtggcctgcagatctgtagcgtttaacatgtacagattggtgtttgcactcgggacaacgcaaccggccccgggttcccgccaaaacgcaatcccgctgcaggccctaggtagcaactccccctccggcttgcagtggcgccttccggaggcggagctactgtgacgacagag

SEQ ID NO: 50385 - DNA, 425 bp, Mus musculus
  source 1..425: mol_type = other DNA
cgaaggactcaggactttccacagtgctgcgggaagtccgcgtcggctgctgcggcggctcggggtggatgccggggacgctgcgcgacaaaagaaatctggctctcagttgtcccgctccgggacctctcgtacctcggatccgggttagttgcaaacgcgcacagttctgcgccacccagtcctgggcccgcagggtgaagcgattcccgccagccgctctgtcgtcacagtagctccgcctccggaaggcgccactgcaagccggagggggagttgctacctagggcctgcagcgggattgcgttttggcgggaacccggggccggttgcgttgtcccgagtgcaaacaccaatctgtacatgttaaacgctacagatctgcaggccaccgcagttccggctgggccttcagggaagagctg

SEQ ID NO: 50386 - DNA, 195 bp, Mus musculus
  source 1..195: mol_type = other DNA
agcagcttactgtcaccatggtcccactgtgacagacgcaccattcaacatggaaatggtgtggccaaaggttcaccagaagactattcacccaatatatttttatattgaaaatattttttcatactctataatctgatcatctagcaaataggtgacaatcatggtaaccgtgttgagtgttggccacaaggc

SEQ ID NO: 50387 - DNA, 557 bp, Mus musculus
  source 1..557: mol_type = other DNA
aagagtgactcgtccctgatttcctcgatgtgttccctagctgtcttgataacaaacatagatgtttttcttttcttctcccggttgtcaactttaagttcaaggacccttctgttgagcttagctcttgttcttagcccaattgcatgtgagtgagaaacctcgttcatgagttcccctgcaaagagcttaacgttagaagagctattaaaactgagtattaaaagtcatctttcactgagggagaacatatgtttcgctccatctgtaaaaaaaaaaaacctttaaaatacgtctatttcatacatgtttcattatcgtttggaacagtgtaaccacagcagaagttcccagctgcacctgtcctaagggcagctcctcccacgcgagccgagaatacgtgggggcctcagaggacgtgctcgccccgggcggagtgcgcctgctttgcaggagccacgcccctgtcccctaagggcctgggtcctacggggcggggcggggcggggcggggcggggcggggcggggtttgctgccggtccccacgcctctgcgg

SEQ ID NO: 50388 - DNA, 467 bp, Mus musculus
  source 1..467: mol_type = other DNA
ttcaatatatatctttatagagcaaacacattcttgacaaggacttatttagtgtttttttcgacactagaaaccctgttaatccagtttccactcaagtagcagcaactatgtcctagccacattaaaatgttccctgaaccagcatctagaaatttaagagaaacctactttataacaaatccaactagtgttcctatagtttttttttttaaataggaaatctttgctcttgatatttatgaattttatatttaagaattcctcattagttagagaagtactattccttttcctggcttacttatgttttattactaattaacaataattattgaattctagtttaatcattttccatataaataaggaggcttagctaggagagaggatgacctgtagatcagctctcaggctccctaaagagcgagaggaagagcctagacagcagctccctcagtttgagc

SEQ ID NO: 50389 - DNA, 379 bp, Mus musculus
  source 1..379: mol_type = other DNA
ctcagtttaagtacctcaatgactctaaactcatatatggaaatgtcagaataaattcattattttgtacaatttgtgtacgctaattaaaatgtttaaagaaaattagtcctcacctgccatacaattgcaaatgagagtccatatgttatgactttgaatgactccagtttttgttatactaaacacagggagttctttgactttcctcttgctaggaggagactgccaccttcaggacacccactaatgacgtgtgtgtgtacaggtccaagacttatgggacttgagcatcacagcttttgcatgatcatttaaacgacagtaacctgtgagacgcccgcgagacaccgaggcgcccgcggtcgcagggcgacag

SEQ ID NO: 50390 - DNA, 511 bp, Mus musculus
  source 1..511: mol_type = other DNA
agacagggtttctctgtgtagccctggcttagaccaggctagcctcgaacgtgctgggattactatgtagtacagaccttgttgaacaatcattattcatctagctgttagctagcattttgactatagtaccagttcaggtcgatacctgaaaccttctagaatagcgcccacctctgtcgtggcgcgtggcctgccgggagcgggctgggtgctggcccggcccaatgggtgcgggctccggaggcgctgatcccggtcatcatgcaggacgtcttcaactgcggacatcatccagctgcctcagatcgtcgtagggccgcgattgcgaggcctggctcggccgcaggcctgcaggtgtcgccaggaggaggccggcagctcggcgctccgctctgctcccgggcgctcagcgggactgagtggccctgcagcctacagcccggcgcggcttggcccaagggcactcgggggacgcgcgggcgggcgtgtgggcggctgtcgcttcctt

SEQ ID NO: 50391 - DNA, 349 bp, Mus musculus
  source 1..349: mol_type = other DNA
cctattagtcctagtgggtatactaaaaagaatggagcttcatgggcacctcctgtttctatgatagatagcatgtatcggctaagttctaagggcttatcattcactctcagcagtagtacttctcataaggaaatgacattggttaattaatagactcagacagggtttctctgtgtagccctggcttagaccaggctagcctcgaacgtgctgggattactatgtagtacagaccttgttgaacaatcattattcatctagctgttagctagcattttgactatagtaccagttcaggtcgatacctgaaaccttctagaatagcgcccacctctgtcgtggcgcg

SEQ ID NO: 50392 - DNA, 461 bp, Mus musculus
  source 1..461: mol_type = other DNA
ctagtagcaacaccatgattgtttgctgttagagatgacagaaactcaggatgtggccttttcttcattatataatattttatgatattgtttctggggagacaagaatgaagtctgttaacaacagatagtgacaacaaactaaagtatggacacttccaaagttcaacttggtgatccaatgcattttattagattcacttacggtggcagcttgtaaaagttgggaacctggagcacactgcagactgtttaaagagtgctctctccaccaggctggtaatgcccctaattcctggaattgcatgcataagccaccatactcatccaaatgttccaataattagatggatgggtgtttacatattttttttaaaaaggagccaaagaaatacacagcaagtaaactttaaacagaagaatgttaaattattaaataattgtgctgttgtgcaaaggtt

SEQ ID NO: 50393 - DNA, 450 bp, Mus musculus
  source 1..450: mol_type = other DNA
caagtgcctttgccatgcagttgcatgcacagttaagcatgcactgagcctgtttcaaacaaaaaaagtctgtttcatgcatgcaaggtactatttggtattataaatactttaatatttaattcagacagtttgggtattttatttatttattttcagttcttcaaggctggaagaaaaaaattaaagtcctttcccaattatgtaacatatatattatgatgggcagtaaatatttttaccagttcatcttctgaaataagacttttttttttcaggaaattgttttaataaagttacagtaacaaaatggcacttgaggtccattcaactggagatgttaatcttcatttccagatctcaaatagcttttggggcagcaactcgggagaggaacagctgtgtccctgcagcctgacaaagcatcagattctcaattgtacttgaaga

SEQ ID NO: 50394 - DNA, 580 bp, Mus musculus
  source 1..580: mol_type = other DNA
ttgtcttcctgtagacagagaggttgttctccagcttcatagacacagtaacaataaatatgtctctcactattcacattgtcatggacaattgcagtgagagagtgtgggtgtacagctcatctccctgatgtaatgtgtaaccttaatacaacagaaatgttctaaaacgccccaacatactcaaaggtagtatgtaatttttatcttggtcctttttcaaaagtacagaaatttattgaaaagattatgaaaccaaactgagcctatatattatagtttgaatctgattataacataaaaatgttacaaagaaagggaaattaggatttagattcttatgtaaaagttgaatatatatatatattcatatatatatatattcatatatatatatatatatatatgaatatatatatatatatgattactatttaggtgttctaagaatcctgtattataagtaaccagaatattcattttaaccaataatatttattcctaacaggaatagtgtttttgttgtaattctaatgactgtgctatagttaactcacattaggaaagggattttgaaata

SEQ ID NO: 50395 - DNA, 415 bp, Mus musculus
  source 1..415: mol_type = other DNA
tacatgtagtctgttatgcaactaagtctagatgaagtcctaaattattttttaagtaaggtactatatcctaaatcaataagaagagcacccgactgctatatggtagctcacaaccatcgatgactccctcttctgaagtgtgtgaagtgtcttctgaagtgtctgaagacagctgcagtgtacttagatataataaataaataaatctttaaaaaaaaaaaaagctattgtcttgagccaggtaaccatgttagcgaaatgtacattggaaactgcttcatattcataaatctgttgactttattactacattatctttaacagtggtcatgactgtctgcaccgactgactgaacttcagtaggctaattaacttaccttggcctagctttagcccaggggaacagtcatt

SEQ ID NO: 50396 - DNA, 112 bp, Mus musculus
  source 1..112: mol_type = other DNA
attcctgagtgattgatcctagctgatttcttaatagaaaatttgaaagaagactatgatggtcactctagacgaatatactcccccaaagtatatctctgtgatataaaca

SEQ ID NO: 50397 - DNA, 542 bp, Mus musculus
  source 1..542: mol_type = other DNA
cttccactacagcctgctctgcctgagccatgacagcctggatgctgccatgctcccaccaattaaatgtttttttataagacttgctcacaaacttgttggctcagtgagttcagagcactgactgctctcttctggtgtatctgaagacagatacagtgtacttacatacatgaaaataaataaataaattaattaaaaaaaagagtaattctggaccataggatattaattatattatttgttcttgcttagtcgctgtcttaagtgcaattaagtaagtatacagttgtgagttttcggagatctggaaaccaaaaatgtcatgtgtaccagggatacaccagaaacaaaacactgtgttaaggttgctttgacaatactgttatcaaccagattattttgcccgcaacctgtaggcgtcgcaccagccactctggtgggttggtgtgtagaggatgacagtcttctccaggcgggtgcaacaaccggcaagcggttgataaagtgtaacagccttccccactctggccgtgacgtca

SEQ ID NO: 50398 - DNA, 419 bp, Mus musculus
  source 1..419: mol_type = other DNA
ggacagcaagatgtctgcctgtcacagccttccacagtgtggctggatggatatgcttccacaaccgaggaagctcatcggctttggaggaagatggtacagaacgttctgaggttcttcctttgcatgtttttgatcatcctgaaaaacaattaagacggttgataaataagttttatttcacaatgcattttgagacaagatcttgttatatgtcacaggctggccttgctaagccttaccagttctacttttaaagatatgggtgataacaaaaaaacattgtgcactaaacaccatagctacagctgtaccttacatctcctctaagccctggggacctgctccacagacccaggggccctcagggacctggatatcagtagagctgcccagagccacagatggtgaccatgggc

SEQ ID NO: 50399 - DNA, 479 bp, Mus musculus
  source 1..479: mol_type = other DNA
ccttttaaaattttgaagagaagataatatgtaatttttttagagtattagaattatggaagttttaaaatagttttgatgactttattagcataccgttttttaaatctgcttaaaaaaaaaaaaaaatatatatatatatatatgtatgtatatattcagattgtctcattatggaactcactgtggacccaggctggcctcaaacttatgtttttaagccatccttttgttaccaagactggctatgacagccccaacttgtcatcagcaggcagacagtggctgccaagctggctgactgctcccacacatatttggggtctagaggcaggtttaaggagaaaactcttgtcccctttaccaggcatttaaagtgaactacagatctgcatttggggctcagcctctcaaggggagttgaggtcactctccctcagggagacaagcccgcagtcctgggttctggcccatgaggg

SEQ ID NO: 50400 - DNA, 395 bp, Mus musculus
  source 1..395: mol_type = other DNA
cctgggtccacagtgagttccataatgagacaatctgaatatatacatacatatatatatatatatatttttttttttttttaagcagatttaaaaaacggtatgctaataaagtcatcaaaactattttaaaacttccataattctaatactctaaaaaaattacatattatcttctcttcaaaattttaaaaggctgctatctgaaatgtttaaattattttaattattgggccagtaacggatgtgcataatgcatatcaaataaaaataaactttacatttttattttaatcattaattgcatattttcatcaaatcatactgacaatcgtcattaatgtcttctccggatgattttttggagacgggagcccctgctgctcccaacagga

SEQ ID NO: 50401 - DNA, 583 bp, Mus musculus
  source 1..583: mol_type = other DNA
ggtgggttccctgaaacctaatcaggtgacaagttcctaagacaatggggtctgatggcatgtgcttgtcagcacagttctgagacataaacaaaacaaacaattgggtttttttgtttgttttgtttttgtagaccagactggcctcgaactcagtcaccatgccggaacaattgttttaaaagccaggtgacaacctggagccaaccttgtctttaagactgcctttgtacccagtgcactaagaaaaggccatgcagtcctgctgagcacagaacccttaaccacaaagcccctggggcctgtggttaagtgggctactctccacactgtacacaggcagtgtacacgttcattggtataaaatgaatataatgttatacatgaaaatattttctaaagtctcctgagcagtatgaagccgcatcactgccctgagactgatcaccacacacgttgtgaagcaatgactgagcattgtgaagcaaggactgctttctgcccagtcggggctcttgtcgtcccagcagaggtgcgcccgaggcccgactgcgcttgcgcagagcctgcggcgcctaggacg

SEQ ID NO: 50402 - DNA, 386 bp, Mus musculus
  source 1..386: mol_type = other DNA
taattaggctcacactgttaggtgtgtgtagatatatgtagttagtataacaaaagttatattttattatgctgaaggtcatcatgcaaggtttacagtctaaatttcttaacctatcttagcttcagatcaggtttctgatttgaggatcactccagatgtgtagagcaaatcactgcctctggatcaggagcagccttggattagttttatatgtctaaaaggcattttttaaaattatgctcatatggtctaagttcatcagagtgcacaatgtgggtgagtcctctggtctcaagccaagtccctggtcccgtgtgagttcgttctggaccaggcacagcaccaggacctagctctctagagctacccagcgcttgggtctc

SEQ ID NO: 50403 - DNA, 642 bp, Mus musculus
  source 1..642: mol_type = other DNA
ggacaggcaacaggcgactgttgggaagctgtgaattaacagcagctatctctcatagtattcagcttaggataatatttacattaatattagtagttaggcacattcatatatgcatatgctttgggtcatactacttttatatttgtaaatcagtgttttggagcaacaagtttaagggaaatatttttgtaaatgtgatggttttgaaaatctgagcaattcttttgcttacaagtttttttaaagcatttgtgctttaaaattgtgctagtgtttggaatatgataccctataacccagctggatcagcagtgggactccggagtccctagggtcacaccagccccttcagagcactccagaaagttctgacatggcctgcatagattatttaggataatgataagtttaaaaaattaatgttgaagaaagattttattaagaatttaaatgttttttcattatattgttaaacttgaacatttagttaatatgtataaaaattgtaagaggtttatatttcatcttaattcttttgatgttgtaaaattcattatttgaatgtttatggcacctgacttgtaaaaagaattacaaaaaaaaaaatccttagaatcattacattgtctcactgtgttg

SEQ ID NO: 50404 - DNA, 443 bp, Mus musculus
  source 1..443: mol_type = other DNA
gcagagctaacctctggtgcacaggcatgtgcttattcacacaataagcttaaaatataaagttcaagatcatgtttgagctacatagttcttgaattacagaaagtcacttgggagactcactaagtacaattaggggtatcctactctagagggcgcaaatacgtcctgcaatgtgtacattcaccctcagcagtgtgctttgaataattcaagtccacgcagacctggaggtcgctctagggacccagctgcagaggtcctcctgcctgcagcctgaggccccaccggccccgcgacctgccggttcgcctgggttcctcgtcaggccagcccaccggactcctggcgagcttccagcccagtcccccgagcgcagcggggcgcgggtggacgcgtggggcagtcggggcatcgccacgttccgaggccgtttatggcgg

SEQ ID NO: 50405 - DNA, 507 bp, Mus musculus
  source 1..507: mol_type = other DNA
ttcacacaataagcttaaaatataaagttcaagatcatgtttgagctacatagttcttgaattacagaaagtcacttgggagactcactaagtacaattaggggtatcctactctagagggcgcaaatacgtcctgcaatgtgtacattcaccctcagcagtgtgctttgaataattcaagtccacgcagacctggaggtcgctctagggacccagctgcagaggtcctcctgcctgcagcctgaggccccaccggccccgcgacctgccggttcgcctgggttcctcgtcaggccagcccaccggactcctggcgagcttccagcccagtcccccgagcgcagcggggcgcgggtggacgcgtggggcagtcggggcatcgccacgttccgaggccgtttatggcggctgggctgggctaagggcaggcggcccgcgaggcggcggcaggaggatgcctcgcgcccggagtgggcgccaacggccggagcgcgtcccgggtcacac

SEQ ID NO: 50406 - DNA, 207 bp, Mus musculus
  source 1..207: mol_type = other DNA
aggccactcctctagtcccagcactcgggagcagaggcaggcggatttctgagttcgaggccagcctggtctacagagtgagttccaggacagccagggctacacagagaaaccctgtttggacccattctccatgagtctgagtgagtctgcctagcatagcatggcacggtgcctgcaccgcttccaacttccgggatccagtgc

SEQ ID NO: 50407 - DNA, 362 bp, Mus musculus
  source 1..362: mol_type = other DNA
tgctctgatacataatgagtctcaggccacgtgtgtcagcagctgttgccacagcagatccatcctgaggtgctaggaatcctaacatgtgcatatcttacatatcttacatgtgcatatcttacatatcttacatgtacatactaagtcacttctgcctattatgcacaaggtcctgggtttaatccctagcactccatgggtgcaggcatgcagtctctaatcctggtctacagtggattccaatatagctagaatgtccttttgttcaattaccatccagaaggtacctgggtgcctttggcggagcacaccaatgcgcatgcctaagtgagcattgttacgcgtactggtgctggacc

SEQ ID NO: 50408 - DNA, 387 bp, Mus musculus
  source 1..387: mol_type = other DNA
agttgcagaggatagaaagccttttgacctccctgaacaatgtacatgaaattacatttaaaattaagtggttctgctttaaaaatattttctttcagcctaaactctgtttttcccttcgctgacagaactgagtagaacatagctcagaaaggtcacttaatgaactcttacccataaagtggttcacattctcaatgacatcaatgacatcaggtaaatgtcccatccacccctaggggttcattcaaccgcttggccaaaggacactttgccgggatctcagagccctcgctaatttggagctccttttcaagagttatgaaaaagtgtttgtctcattgttatctttccaaatgaggctggcgctgtgccttgaggcccggg

SEQ ID NO: 50409 - DNA, 461 bp, Mus musculus
  source 1..461: mol_type = other DNA
acatgtttttgctaaggatcaaatccagggttttgcgcttgctactcactataaactttaatgcaaacataaactttactgcgtatctagctagtgccctaagtacatgcttcatcagcttcttagtaagtgtgtacgtgagcgcgcgcgccagcactgtgtttctgccaccaaatgactcaagtagctgcgtccagaaactgatgtgattcagtttgattaactcctggggccaggagatttcaataactttgttatctagaccacaaaatctcgtaattccagggtcaaaggggttcctatacctactacacggctttccgtggcctctccggggacgctcgccgcagccacgaccacccctttccagctacctccttggaagctgggggtggggccgctgcacacggtccaatagggaacgcgcgcgcgcagacgattggctgccgtgggagggcgct

SEQ ID NO: 50410 - DNA, 279 bp, Mus musculus
  source 1..279: mol_type = other DNA
ttcatatatgccagccctactgtgctccagatgacctggtgagctcaactggcggggccacataggtgctgtgagcagcggtggctaaatttgttttctgctccacagcacagatgcagaaagataggtccaggcctccatggacccctcattcccgaggcaccctggagacctccctgcttaccagagtccctacccccttagcatcctaggatgctcatggacagcctccccgacacaatggttgggggaggggcccagattggctcctcccccacc

SEQ ID NO: 50411 - DNA, 626 bp, Mus musculus
  source 1..626: mol_type = other DNA
ttttgctaagaaaaagcctccccttgggagatcattgatggtttttttctcagagaaaataatggaagagaagagcaaggggaatttctcttgaatatatttctccttttcgacattaaaaaaaattacagttcaaaaataattcgtatgcgttcacattgtggatcaaaggcgcgcatgcacacacgcgcacacacacacacatatgcgtgtgtgtatttatgtatgtatatatatatacatatatatatatatacacgtgtatacacgtatatacatatatatgtgtgtgtttatatatactatatatatacacacacgtgtatacacatatatacatacatatgtatatatacatgtatatatacataagtataaacacacatatatatgtgtgtgtatttatgtatgtatatatatatactatatatacacacacacgtgtatacacgtatatacatacatatgtatatatacatgtatatatacataagtataaacacatatatgtgtgtgtgtgtatttatgtatgtatatatatactatatatacacacacacgtgtatacacgtatatacatacatatgtatatatacataaacacacacacacacaagccgagggcg

SEQ ID NO: 50412 - DNA, 559 bp, Mus musculus
  source 1..559: mol_type = other DNA
catatgccggccacaagtgctcaggcccacaaaggcatcggtccacctgtgagtgccaggatataactttttttttttttttggttgagaaaaaccaaccaaaactgggacaggccgtggcgagagaaggggcctgcggcccgggcatcgcgctccaccgtgcaggcgaaggcgcgcgctggcgcttcgagccacgcgcagctgcccacgccacgttctgccggcagccgtgtgaagcggaccccgtacgcctgcagcgcctcggcgaacacctgacacacgcctgcttggaggggtgggcgcagaggggagtctccatcgacctcctacctggaagcacatgcacgtgctggtgaccgtccacgtgcgtgggggacctgcccagcaactcccggaagcggctgacttctagttcctcccgcacctgaagggaggggcactaggagctccgtctggtgccgctccgctgccgagaaagaagccttcggggctggagcgacgaggcgttgtggcgggccgggcccaccggacggccctcagacaggttggcgtgaagacc

SEQ ID NO: 50413 - DNA, 326 bp, Mus musculus
  source 1..326: mol_type = other DNA
tgaggccaccttaggctacatgaggccttacacttgtaaaagcactgagtgagtgtaggatcatactatgtagctaggctggctagaatctatgaatgttagtgtgggcgtgcacacacatgcatgtggagacctgaggtccacagaattctgaggctcacagatctgtacccaagtgttcagtaacagaatagtagtgcctgaaataatcttgattattctattattttgtgtacacactatttatagtgcacctactatgtgtcaagcactgtatgtacttgccctcccccgctccaggaagtgagggggttctagccgcctgg

SEQ ID NO: 50414 - DNA, 205 bp, Mus musculus
  source 1..205: mol_type = other DNA
tcactgccacctcaactcctgcaaatctgagtttgaggccagcctggtctagggctcgagctttaagcagatcttgtaagaagtttacctaatttcaaaggtgagatctgaccagaattcagaggaaccatgtgtgggctccgaaatatgcccggggtatccggggaagttcagaggctagaggcgcgcggagggcacctagggg

SEQ ID NO: 50415 - DNA, 439 bp, Mus musculus
  source 1..439: mol_type = other DNA
ggtaaactaagaattttaattttttttaatctgttattttaagcttgtacattcggaaagcacacaacctccctatagaacagctgtaggttctgaaagtagagagatggtcatctaataactctctagagaataatccgtgtgaaccccaatacatttggatggccacaagtcttgggtcttactcctgtgacctgcggcggtcaccggaactctggataagtaagcagagtgtacacggacctctccgccctctgcgcaagactcccaggcctcttttgcaggccttcctgcagtcttccgtttgatcccgttctggcgcctgcatcgggaccctgtaggcgatggactcagacccctcggcggccccgcccagcctcagggttccgccccccaagggtccgcctccaggtccgccctgtcgctcgcccattcagat

SEQ ID NO: 50416 - DNA, 372 bp, Mus musculus
  source 1..372: mol_type = other DNA
gaagagcagtcaatactcttaaccgagccatgtcttcagtccttctttaaaaaaaaaaaaaaaaaaaatcttcagacacaccggaagagggtatcagatcccatcccgctgtagactaggctggccttgaaccacactcttgtttagacctctaggctgaccttgaactctagtacaaggtacggaccatcaagtctggtccttccttagaactttagtaactttttaccaatcagatctgtagccttggctaatttcaaactgtagaattacagatgtgggcaaccaagcccggctttgtatacctgaattgacgcgggccaccaagcccaggcggtcggggcggagctctggagccatgactgagccgca

SEQ ID NO: 50417 - DNA, 431 bp, Mus musculus
  source 1..431: mol_type = other DNA
cccgctgtagactaggctggccttgaaccacactcttgtttagacctctaggctgaccttgaactctagtacaaggtacggaccatcaagtctggtccttccttagaactttagtaactttttaccaatcagatctgtagccttggctaatttcaaactgtagaattacagatgtgggcaaccaagcccggctttgtatacctgaattgacgcgggccaccaagcccaggcggtcggggcggagctctggagccatgactgagccgcaggagcagctgctgcagctgcagaaggacaaccgagcgcctgcggaagccctcaccgggcgcctggaggagctgcgggagcgcgagcgcaggtgcgagggcaccgaggccccggcaggcttgtcgctccaggcagtgggaccctagtctggaactctcaggctg

SEQ ID NO: 50418 - DNA, 259 bp, Mus musculus
  source 1..259: mol_type = other DNA
cagtccctaatagactggagagtctctctgagcaactcgatggagatgtatgtggagttaacacacacacacaccttagtacaatataatccaaagatatattaatttggtaactatatacaacattttaaaagtttttgagaaaaagcttcccgtgaacttaaggtaactccatctattgtgtaggtgcctcaggtatgcataacttcagcgagatgtgctgaacatagtttggaggacatatttgctttggaaaaca

SEQ ID NO: 50419 - DNA, 275 bp, Mus musculus
  source 1..275: mol_type = other DNA
atagcacccagctgtagatgtacctcagctgggagagcatactcctagcactgacagtgcagcactgtacagtataggtcagtgtctttttaaaaagtccctaagttatgattaaaacaatccggtggtggaatgagatctgatgccctcttctggtgcatctgaagacatctactgtttactcacatacattaaattaaaaaaaatttttttaatctttaaaaaaaaacaaaacaaacaaaagttttgagtgtcctggcattctaaggcaagca

SEQ ID NO: 50420 - DNA, 423 bp, Mus musculus
  source 1..423: mol_type = other DNA
cttgaagaactgaaatacaggcaggtaaacatcaggtgataattctttacactatgtccatgaacttacggtaggcaaccaaaagatcgtaaacaaaatatttcttcatcccgtttttatcacctcggaagaggcgactccgatcttctccgatgacctgctggtactggcagcggtagcctcggccctgcgcaacacctcctgtaatgggcgcgtcggggccgtcaggcaggtcgcggacgtccttccacggcgcgggccatagcccagcgccggcgggcggattcactgtggacgccgcgcgcactacttccgccagcactgcgctagagccccgcctccagagccaacccggcggcggagcggcagagggggaccaggccccacccagtgcgggggaggtcaggtggccgggaagtcggc

SEQ ID NO: 50421 - DNA, 400 bp, Mus musculus
  source 1..400: mol_type = other DNA
ccatttcatgagaaccaaaagcccggattggactcttggtccgcgcctgagatgtcacagcggtagtcccccagcagcgtcccgccgcttcggtctctgcacagccagggagcggtgctggagccagagctggaccccgagccgccgccgccgccgccgccgccaccgccgcctcctccccgggccccagcagccgccatcacagcgcacgccccggcgcaggcggctgggttcacagctctgggctcgccaccaccggtccttactgcgcaggcgcagaggcggccgacttcccggccacctgacctcccccgcactgggtggggcctggtccccctctgccgctccgccgccgggttggctctggaggcggggctctagcgcagtgctggcggaagta

SEQ ID NO: 50422 - DNA, 453 bp, Mus musculus
  source 1..453: mol_type = other DNA
attcctatcttgatagatagatagatagatagatagatagatagatagatacgaggctagcctggtctacaaagtgagttccaggacagccaaacaaataattaaataaataggtactcaacaggcttggttgatcttcaccatcattccacgtgtacaaggaggatcacctaggcgttatttgataggttattcagtaaccaggttttcaaaacgctgcagctgttttcctgccaagcccgggaagcctgacagcagcagcttctcggcggctgctttgcggtccaggaagggcctgaccctctgcctcctcccggaacgcgggagcccgcgcgagtggctcacgctgggaccctcgcgaacgcacgcgccggcctccgcggtggagggggtagagcccagctccgcgcgtgcgcagattgcgctggaccaagggggaggtgcccggctgct

SEQ ID NO: 50423 - DNA, 439 bp, Mus musculus
  source 1..439: mol_type = other DNA
cacctatcagctatgcgccctagtggggagggagttatgaagaataagtgctatcagccctgctggtgtataactgtatctcagctatcaaggcctgcctggacccgagagccagttcaaggcctgcctgtctgggcactctggaggcagagggaggcagatctctgagttcagagccagtctgatttgaatcctaagaatttcaaaaataattaaaataataaataaccgctactccggaagctgaagctgaaagagttcacattcctgcatgtacatactgcacacatgaaataaaaatattttttaaaaaaatatttcaggcatcgctctggagacagagagctcccctgcctccctgactcaaacccgggcaggtgggctaagggggcggggcggacgcctcgggctccaggcccgcagtgtagccgcagcgccg

SEQ ID NO: 50424 - DNA, 363 bp, Mus musculus
  source 1..363: mol_type = other DNA
ttttactattttacatttataagctcttaccaaaaaaatatgaaactagaccaactgacattatatccattgaatcatttcacgggtgattcagctggcagctaagagcaccagctgctcttctgaaggtcatgctggtgcatctgaaggctacagtgtacttagatataataataaataaatcttttaaaaaaagactcatcctggaggagggcggggggatcttccgggagatgccgggagcgtgtagctcgccgctgccttgaggagccgggctgccaggttcctcgatagcgagccgcgtcgcgggaagcgcgaggtttgtcgggaggcccgacaaccggcctacaccagcggcgcagg

SEQ ID NO: 50425 - DNA, 184 bp, Mus musculus
  source 1..184: mol_type = other DNA
actttgttcctggacggcctaggcctttacaaggccattaaaagaaaatgttctaaatgtgtcgttaacattttattttgtggggatcaaaggacaattactggacgttggttctcgatcgcccgccccgccaggatctcttccggtcccgccccttgggggcccgcgccacgggcgacggagt

SEQ ID NO: 50426 - DNA, 484 bp, Mus musculus
  source 1..484: mol_type = other DNA
cacagcagactctgcagtctggccaggagcggttgtagactaccactgccagctgcagcagcctctgggagacgcccacacgagtgctgctgcggctgcagaagccatgttcccagttcctgctggctgcaactgcatgagtcagcaggcaactttagccgcagctgaactggaggccaagaagccatgcatgggattcattcagtaggagctggctccgggaccctatgcatagagagaggaatagacctgtccctgggtttgagatacccctgctggcgcagcagcatagcaacctctagatcttgaccgcatagctgtggccccagagaaaaactattgctaggctacagatcttctgtagagccgctgtctccataaggttgtgttttcttttgcaaacaagacccggttccggtgggagggcgggcaccgttactggccccagagaccacctaccgcccacatccctgggaagagttcc

SEQ ID NO: 50427 - DNA, 432 bp, Mus musculus
  source 1..432: mol_type = other DNA
gaatatcctcaagtgaggattccaaccccacgcggaggatgaggcaccttctgcttccagagcagagtgtgaatctgcagtccaggacctttcggcctccagggtctctgcctgaggcccagtggccgcagctccgcctggaactcttcccagggatgtgggcggtaggtggtctctggggccagtaacggtgcccgccctcccaccggaaccgggtcttgtttgcaaaagaaaacacaaccttatggagacagcggctctacagaagatctgtagcctagcaatagtttttctctggggccacagctatgcggtcaagatctagaggttgctatgctgctgcgccagcaggggtatctcaaacccagggacaggtctattcctctctctatgcatagggtcccggagccagctcctactgaatgaatccca

SEQ ID NO: 50428 - DNA, 314 bp, Mus musculus
  source 1..314: mol_type = other DNA
catatgtattgccacacatacatatatgaaaactatgtatacatacttatacatggttttgttttcaatctgagaaggaatggagagtcctttaagaatgtccaggtccctgatgagtactgtccttttatgggacactaccagagtgccagggtcactctgccactggacatttatcaggcttggctctacccccaacctggacccagactcagcgttagtcgagcaggcttcctcacctaggaggacccaggtcgcggggaccctgtacagaaccctggcgcctggcagcgaggggcgggccctgcacgcag

SEQ ID NO: 50429 - DNA, 329 bp, Mus musculus
  source 1..329: mol_type = other DNA
ccaggccctgcagctcccgcagggcaagcatcccgagaggtagctgtccgctgcctgacgatcagatccagcagcacccagaaccgtgcctggcatatgctgggtacttccttgaagcactctttaagggctctaaaaaaacaacttttaaaatttttattagcttaagaagtatgaggtggcctcaatcacagagatctgcgctgccaccaacacctggtttggttcttaaccaggaagaattctttcaaagaagtttcaattattgattgcttgattgttagacagggttaaaagcgtgtgtcaccagggcaacaacctctttctac

SEQ ID NO: 50430 - DNA, 488 bp, Mus musculus
  source 1..488: mol_type = other DNA
gcaagcactggacttttgttttcttgaagacgaactcactatggcagacttcggaactctggatggaattaaagaagtgggctggccgttgtgtctctatttatacacaaagattcagtgagtgttggaagatttgtgaaactattactatgtatcccaacctggtctacaaagtagtccaggacagccagggctatacagagttggcatacatctataatcccggttttacacaatgaattccaagctagtttgcactacagagtgagaccctggtggtccctagcacccacatgagagatcctggggttcacgggccagcccagctagtcacagacctcttctcaaaatctatgaggtggggaatgagaccggacgtcgagtgctggtctccacaggtgttccggaccagtgtttttgcggaacgcggccgcaggccccgccccgcggcgcgccccgccctctccggcgcgccggttcccaaggcg

SEQ ID NO: 50431 - DNA, 421 bp, Mus musculus
  source 1..421: mol_type = other DNA
aatctctcagtatgtaaaccaggctgccttgaattcaacagagattggaaaaaatgaagacttacaaaattggttagttaccttgtaatctctactctaaacttaaatcatataaacattgaaagaaaacattaacagaaataatgcttttgctttccttttaaatatggagcttaatgattcaatgagcaaacctaacattgcttgttggtgaaatactagctttattttgatgactgtagaatgtacatatacttatgtacacttaacatatgttagaaattaaaatctcaatatttaaataccaaatttatttaaaataccaaaaatatgttatacattagcaacaacaaaatatacatagactctgtatgtgtgtctgtgtgttgcgtatacaaaagcaagaagtagcgggatcgct

SEQ ID NO: 50432 - DNA, 119 bp, Mus musculus
  source 1..119: mol_type = other DNA
ccctcagagtgtggtcctcctcgaggttgaccttcaataggcacctcgagggtggagcttccggacagcggatccttcggaagagcagccggggtctgacccttgcgccacgtgacgga

SEQ ID NO: 50433 - DNA, 257 bp, Mus musculus
  source 1..257: mol_type = other DNA
tagccaggtaaaggaagctttctgactccgaagacttctgtctacatcttgcatgctgcaggagatcaagtgaaccggggccttctccaggacccctttgctcccgggcctggcggctccagggcttctgacccgagttcgtgcatggccagcgaccggagggtggggtctggcgcgcggggcgggcgctgccgcctggccggccgcgctggcccaggatcagggagccgtcctgcccggcccggcgcccctcctgc

SEQ ID NO: 50434 - DNA, 269 bp, Mus musculus
  source 1..269: mol_type = other DNA
caatattttaatttttatagtttttgtgtacaccagactttcagctgtaatcaagttcactgtcctaacttttggtggggacaggagcttcattctaccctcaacggtgcctggaaggaagagcctggtcctccagcagtgctgagggagaatactgagaggggcagccctccatggtgcccatgtgcagactcaaactaagtcattttcactgctgtaagagtaataaagttacactggctgcagcagctctgaagtttaggctccag

SEQ ID NO: 50435 - DNA, 258 bp, Mus musculus
  source 1..258: mol_type = other DNA
gacggcagcgtcatccatggtgccgggagtgcccagtgcctccgaggctgccctctacatccctgcctgggccagcagtgtcctcatttacactgtggacagagagtcctctgagctgtccaggcctgctgtccctgcctcctaactagaagatctgccagtgtactggagcagactgaagactgttcatgcttggctccagcctgaggcatggctcattaaggtaacccttaaagtcactgagaaggtgacttcagt

SEQ ID NO: 50436 - DNA, 254 bp, Mus musculus
  source 1..254: mol_type = other DNA
ctatgtccaacatcttgggccaagacctggtaaagttgatggctccatgtatctatgttcatgactggtccagagactcgcctccaggagtaaagatcgttcaggtccagctatatggcgccagcactgtcagtccttgtgaccctaccagcactagggtggtacctcgctggagccccccgcccagctcggcgttcattggttagtgcgggccggaggcggggtggcgcgggccggagcaggacggccgccat

SEQ ID NO: 50437 - DNA, 158 bp, Mus musculus
  source 1..158: mol_type = other DNA
tactcatatgcataaaataaatagataaatcttttaaaaaaaaaaactgaagtcaccttctcagtgactttaagggttaccttaatgagccatgcctcaggctggagccaagcatgaacagtcttcagtctgctccagtacactggcagatcttctag

SEQ ID NO: 50438 - DNA, 176 bp, Mus musculus
  source 1..176: mol_type = other DNA
ttgctctggctcgaggccctgaggttccaggataagggagaatagactggacccaccactggactgacaactcataggaagttttcctcaaactagtgagggccaacacaggaccagttcccatggaacagggaaacggggatgagactggacctgcttctctctgggtggcttcc

SEQ ID NO: 50439 - DNA, 396 bp, Mus musculus
  source 1..396: mol_type = other DNA
gctgcattcccttgcatggtaaccattgcagctttctctggttttcacctgagctcacttaaaataatgtttcttgacaggactccaaagatactgttgccacttgacatgtccactttacacaatcattcggaagaatccaaccagagatttaagacccttttgttctttcttttcatttaaattttgttagataagtatacgggaagaattgtcttagtgttcttagtttggaagtcataaccaaattttttgaagtatttaaaaatgtctttgaagcatctgcatttttttttttttttaaagaattggaacttttaacagagggactgtggcgtcagtcactctacagctagtgacatcattggagcgccggctttgttacaaaaatactgc

SEQ ID NO: 50440 - DNA, 402 bp, Mus musculus
  source 1..402: mol_type = other DNA
gagcccctggaatcctgcgttgatcagtattatgacattaaacaagccacaatgttttcagatcacaaaacacaagtatttgttcaagaaaaatatcttctagtctctacgcctttgctccccatcctgtaggtattcttctataggagggtcatcctgctgacagggtgctgagctcactggaaatcttcattccaggaatctccagtttcatggagggaccctgtgagttagaggcttccaaggtcctggcattcctcctggcaggcgaccttaagcctgccttaaaagatataaaggatgggctcctgatccccgtggcagagtgcaggactccctgctcccagcgcagtccccggtacccagacgaaggggcttgccctcctccatggccggggatta

SEQ ID NO: 50441 - DNA, 495 bp, Mus musculus
  source 1..495: mol_type = other DNA
cacacccaacgcactctgttttagctaaagccctgtgatagcttctgagccaacccagagctgggggagatcacctgcttcctttcagacagcagggaggtggacccttaggcctccaaaggtctgcaaagactcctgggagcttcaccccaagccggctagggctgccccctccaggcggctttgagacaaagacttctcaagaccccctgcctaggaaaattccgggaagggcagagtgatcatcgcactgcccgggagttattacaataattcagaagactgaattcacgcaccggggtggatgtgtccctacatcgcccccaggatctcgaggcccacccgcgctccagactgctgtccggagaccacgcctccggcggggttctccgtctccccggaatccagcccgcctcagtttcccggctggcacggggcgtggcgtgggcggggctcagctcaggccacgcggggcggagcccgggagctgacgtg

SEQ ID NO: 50442 - DNA, 368 bp, Mus musculus
  source 1..368: mol_type = other DNA
acagcctcgagcctgtagtgtacaacctgggccacgaggcacatcatgtcaatgtatctctggaaaaatttcccatgtccttaaacaggaagtgggtacctgctgaccaatcctccttaagggctggtgactccactgtgatttataataaccgatagtgttcacctgctgtcctgagatgcccagtcatccagagacccctgagcatgctcagatggagcctcagaagtgccaccctgtactgaccctgtacacacctggccatttcttccacatgacagaggaactaaaaggcttcagtcacctgcagaatgtcaaaagttcctgtgtgtccagggggcgcgcaaccagccagcaagcctcttccc

SEQ ID NO: 50443 - DNA, 542 bp, Mus musculus
  source 1..542: mol_type = other DNA
tatggatggtgtatgttttaaaatctcaaaaccagccggaccaagtttccaaatatctgcattatttatgttacccagatctgaattcactacttcagagtgattcaacagagttatatttttaaaatagtaataaaagggaaatgtaatttttatttaaaaaaacgcggactgttgagccagcatgaattcaactaataaaattgtcctaaagtcttttattaatgagaataagaaccctaaagagaagctggctctcctccgtacaggtcccccagggtggatcacaacccgctgggagtgtccagcttccagtggcctcagtctgcgcacactaggcgcaggccagactggcttctttaaaacacccagcaggccagagttgcttctttatgggcgcgcacctccaaggtcagcaccacttgggagctcagcgagccttcttctccctaggacaaagcgcttacaagcagtctccctggacgcaccacggtgaacggccggagaccgaccggaggggcggggcgcatgcgtcgttcgcg

SEQ ID NO: 50444 - DNA, 317 bp, Mus musculus
  source 1..317: mol_type = other DNA
gagatggcgaaaaacattcccatagctctaaatagccctagtctaagatagattggggagtttaaggctccaaaacgtttctgcagactgggggtcatgttgccacccataaccagactaggtctctgcaggagtctggctccaagagttcacagtggaatcgaggatctcttgcttcccccgagggctagctttaaggatactcagtttcgaggccccgctgctctggaacctaaaatccgggtgtgccaggctggcttggggacaggaaaatcccggagctaaaaagcccggttcccaagggacggggtcttgag

SEQ ID NO: 50445 - DNA, 436 bp, Mus musculus
  source 1..436: mol_type = other DNA
tgcaggctcttcaggccctatccagctctctggctagataatgtgcaggacggactttgtaatctccattgcaaagggggctggagagagcactactgcgctattacagcggaggcgggccatgcaaaggcctgctgcatctgtccgcagcctgtgccgccacgccctcgagcccgcgcccacggccggttccgggacgcggtgcccgcggccgcctgcaggggccgccgcctcttcaggaatgcgccgcctttgtctgggaccgcgcgtggcccgtgcaccgggtggctgagcgcgtcctgccacttgcaccgcgcaccggtccgccccagcgcggcgcgcccaggtgagcgccccgcccggcgccaggccccgccccggccccgccccgcccggaccggcggggagaccgggcggattccgcgcgtccctggcc

SEQ ID NO: 50446 - DNA, 420 bp, Mus musculus
  source 1..420: mol_type = other DNA
aggcctgggggcggctctgggagccagcaccctgttcaggcccttgaccatgttcttactcaaagagatgcctgcagcatccttggagggccggtccaagctgcgtcctggcgcgggcaggtgggcttgccgcgggtgtggtgagcatgcgcagcccggcctcaatcaagcctgcggcctgagccaggacacagagaaggtttggatagccatgatacccctaccttgcaccccagtgactgccaggggaccttcagcctgtcccgggactgtgacaaaaagaacatgctttccgttgttgcgtggggtgtcgggctaccccgcaaaagaggagttggccgcccggcgctccaccctcagcccgcccccgccgcggccctgccgccgggtccaccttaaggggcgcgctgacatcagcgc

SEQ ID NO: 50447 - DNA, 419 bp, Mus musculus
  source 1..419: mol_type = other DNA
agcccaggctgcgttccaggccctgcagctggcccaggccctgcttcctctttttgacagggccgcagcagtcctccatgggctccggaacctacgtgtccgacagtaatgactggtctgttgcccggaccagggtgctcacgaggaccaccggctcggcctcgatacgaggtacgccgccgctcagagctgggactgaggtttgcggatccccaagggccacacgctgcgcctgccttcggctggccagcgcacaccgcgcgcccagcagccgctcacgccagcgtcggaggcactcagcctgcaggcggaagtgcgcgcgtgggtcgccgggagagcgcgctccccgggctgaggcgcggccgggcatgcgccgcgggcgttttggcgggaagcgcggggcgggccgactggcactg

SEQ ID NO: 50448 - DNA, 536 bp, Mus musculus
  source 1..536: mol_type = other DNA
tgcggctaagctcgcgcgtctaatatctgtaccctgcgctgggacgcgagctttaggagatcggccacctccaggtccccaggtgaagccgggagcccagtttgggcatggcttgtagaccccgagatcggagagcaccccaggcccaggcgcctcgacaggccccgaacccgcaagccagcgagggttggaggccgaggcgcgggccgcccacgtggccgcccatagcggcccttgcctctccggctgccctgccccacccgggcctcgctgtaccttggcggccgccatgggggcgcggcgacggtggctcgactagctcaggcgtcgctggctcggcggcctctgggcggctagtcgcaggcgccggcgccagtgccagtcggcccgccccgcgcttcccgccaaaacgcccgcggcgcatgcccggccgcgcctcagcccggggagcgcgctctcccggcgacccacgcgcgcacttccgcctgcaggctgagtgcctccgacgctggcgtgagcggctgctgggcgcgcgg

SEQ ID NO: 50449 - DNA, 542 bp, Mus musculus
  source 1..542: mol_type = other DNA
agagtgcctggctatatctctgaggtctctagtgccacagagttgagctgagggtctcacatgtccctcttatggcctgaaggaggccatgcattttttgagctctaagactgtattttttgtgcttctgaaataaagattaaaatgaatagttgataaaatacttaatttaggacttaaaatttaaagttatttttttctgatgtctaaaaggcttccttaaaggcagtgttatactacaccattgataacatttgacttttaactttgtaccagagaagtaaaaggtttctgtcatttgtgatgatatttttaaattttttacttagacgtcaatcttttaagctgagctaaaagctgtctacattaatgaaaagagcaatgtggccaggcaggacgacaccgggtatgtaaggtggtttaaaactctggtcttttaaagtagtcttaactgctcataatatggagacatatgagagtccctctcctctcccgcgtgagcccgcaggagaacaaacgtccagtgatgcagaggtaatgga

SEQ ID NO: 50450 - DNA, 501 bp, Mus musculus
  source 1..501: mol_type = other DNA
cagcaattactgaagtgtttgcctaacggcagacagttttctataaaatttttattacacttattgacttgaatcagaacctaaaggaaagctaaactatttgaggttctggatagtataaatataacttatccccaccttatgcttctccttcctttgggtgtacctccaacattgtccttgggacgacccagggtccatttcttcgtcaaaagtgactattgagctcaacagaggccagctcatagatgagctcgctccccggctcccggcagcctctacgcgcctctctcccggcgcgccccgcggccgcaactcagccccacccggagcgacagccgttagaagtgccaggcttgcggctggtcccgccccatagcgcctcgcaattgggccgcgcgcgcctcgcgctgccgattggcggccgcctcagcccgctcccggctcccccaatgcgcggaggccgtgcgccgtgattggtagccctccgccaaggcccgc

SEQ ID NO: 50451 - DNA, 396 bp, Mus musculus
  source 1..396: mol_type = other DNA
aacataattcccctttcccgggaagaggacgcttttcattgccccggggaaagagggcttcatagaagaaaaaaagctctagtttttctagagtctcccccaaggctggaagtccaacgactgggttcacgccctgtaaaatgggatttatctttacacttgcggagtgtaagataaataccattctatgccaatagaaagcacagctcagggcctactatccccagcctctgaagatggccgggagggggcaactccgagcctcctgcagctgctgcagccacagcattccgggcaggtgtcagggcctgctctgctaggggcaatcggtgcgggttgcggggcgcgtctctctaccaatgggaaaattcgcagttggatggggcggggcggagg

SEQ ID NO: 50452 - DNA, 424 bp, Mus musculus
  source 1..424: mol_type = other DNA
ccaccatgtggatcccaaggatggaacacaggtggagcttcttgctagctattttacttcaagtgaatagcttaactgctctgagcaattatatttacatctctcaagtggagtgaatgagaactgggtatcaagtcaactgggttgagagtctgtagtacggaggaggtacaggaaagcctctgtgacttcttaaggactttttttagtgcagggaatacaatggtctagagataaagaccaggggtccagcgcctgaaccgggcggggtgcagggtcggtgcatcgccagccttggtgcatctccagtcttggtgcagctgcgggggcggagcgctatatctctaagcgcccttcgctgctgcgcccaatagcgagcgctctggaggcgggccgggcgggttctgggctggaggctaaagcc

SEQ ID NO: 50453 - DNA, 283 bp, Mus musculus
  source 1..283: mol_type = other DNA
gcatttctatattagaacaacttggacttgaccttgagctcctagcagaacagaatgtgttgtgggagggccccatggccctggacctcacaaccagccacgggagatgctgtcaggcctgggaagctcctgccctgggcctggctcaccactgctttagcaagcatttgactgtttcctaaggcagtctgcctgccccacccccaccattccttgggcacagccaggctagggagctgtgccacctgggcaccgttctccagttacctaagcactgctctgg

SEQ ID NO: 50454 - DNA, 352 bp, Mus musculus
  source 1..352: mol_type = other DNA
gcagagaaccaagcctgggccccttccttggagtacttggaatacctctgtagtgtggccttagtctaggcctcgtcaaactccccaggtgtggctgctggacagctgcaagatacatcttgctgcttctgacaagagcccagaggtcccactgtctgatacacagtttacacaactgtaaaggtgaataggcatatacacagtccctgccaaccctagagacaagacctggggctggcagcccgtcaggcctagctgcagagtcccgccccagcctgtggggggcggagcctcgcccgccccgcctgggcgcgcccctcccgattggcgtggtcttggccgctgccaggtc

SEQ ID NO: 50455 - DNA, 413 bp, Mus musculus
  source 1..413: mol_type = other DNA
gtaggttaggctgaccttgaactcagagttacactgtaacaccactgccaggtttaaatatgtgtgtgtgtgtgtacatgcatgtatacatacatatatacatacatacatacatacatacatacatacatacatacttaggagcttctaagctacctctctagtggatggatggatggatggatggatggatggatggatggatcttctagtataataatggatagtataaactaagagctgcacagtagccacagggaccattgtccccctggatagttcgatacccacactctctgagactgggaatgtgtaggtcagtttctgtcaaaaattggccaaaagacaagttgagttcctcagaatttcatacagtttccatgtctgcagctcaataagaggtggagtccagg

SEQ ID NO: 50456 - DNA, 302 bp, Mus musculus
  source 1..302: mol_type = other DNA
ttcagccacggtcggtggcaactacctaagcagtctgtggccagcttggctaacagccctgacatcagggctacgattccaaagactgggcttgctgccaccacctggcctgtgtgggcacgcccacgcggacacgttccaggacagccccgcctcgccgcgccccttgtcccgcgtgtcagagcccgtgtccgcggccggaagcgcctgctgggtccacgcagcgccgccaccatcgccgccaccatcgccgccatggtccggggacctcaggcggtcagggctgcccttcgcactgcctg

SEQ ID NO: 50457 - DNA, 288 bp, Mus musculus
  source 1..288: mol_type = other DNA
gtcccaattattagggcgatgctcaagtcgtggcagctcccactgttctcccaaggcttggagggccagcaaggaccccaaatgccctagtgctcctgagctccaaggggtccctttgggagtgcaaggagtgacccgggggcaccctaagtcttataatgggccaggccctggatgtgcctaggtcagaaccagttcccacgtacgccgagctccgggcgggcaccactcacctcgtcaaggccgcgcacaggtctgaccccgaggcgcggacgctcaggcagtgcg

SEQ ID NO: 50458 - DNA, 380 bp, Mus musculus
  source 1..380: mol_type = other DNA
cttcccttaagggaggaagtttaaattatcaggtcaattaccttggaaggtacaatgtgatctttgattttcaacatttcagagatctttcatgaaaggtcctggttgtgggatccatgcatatgcatgtgaggggcacacaggtagcgcgctagcttgcttggtaccggaggcctgatgacgccctgtgggacccaggatacggtgcgcgcgctcccatcagcctccgcgctggcgcgctggcgcggtgtgaccctctgcgagatggaggcctcgctgtttacggcgcaggcgcggtgggccgaacgtgcgcgcgcagccccgcgggaaggctaacttggggcgtgcggagcgccagagccggtacgtcgggggtggcc

SEQ ID NO: 50459 - DNA, 301 bp, Mus musculus
  source 1..301: mol_type = other DNA
caggccgcccgccagtcccctgctgtgaggccctgcggcccagcgggtgggaaggagctctaggccgggtgggctccaaccttctgggattgagcagtcttctgaagtctgaagaaggggagcgcgctggcggcggggagggccgcgcaccggcccgtcgtccccggagccggtcggagcggtcggggggcccgggcccgcggagcctcggcgggggaggggcggggggtcggcggggcggggcggggcggggcggctccgcggggccggcccgcggggtggggcggtgcggcccggggcg

SEQ ID NO: 50460 - DNA, 255 bp, Mus musculus
  source 1..255: mol_type = other DNA
gatcttgagagtggagttgggaggcccccctctgccgattccagtggcctactgagcgcggaagtaggccggttcctcccttactccctaatggaggaaggcggggccgcgatgctctagaccgctcgcgccccttcctgagtctctgtcctggtgacaggagaatgttccatgagcccctgggagcgggcggggggacggaagcccgggctgcctgcggccccaggcgagcgcgccggctcggagtctggccag

SEQ ID NO: 50461 - DNA, 317 bp, Mus musculus
  source 1..317: mol_type = other DNA
aaaattggcagcaacactgtggtggaggccaaggggcagcgggtccgggggcgactgtacccctgggggatcgaggggtgggtggctcccctagactgacaccgactcgactttgtgaagatccagcagatgaccaggtgggccacccgcaccagtagcaggccaggcggctcccacggaagcagagggcagagctacagctctcctgccttttagctaaggcgcatgcaggagatgttgcagaagatgaagccacgtcgtcgacaaggatagacggccggcctggatcccagactgtcctggattccaccctgggt

SEQ ID NO: 50462 - DNA, 436 bp, Mus musculus
  source 1..436: mol_type = other DNA
gcagaagttttgcctagctgagggctagctaaagcttccaagctctgaaggaagcctgtcctggacttcgctatgtagaccaggctggcccaaaactcagagacatccgcctgcctctccaatcacccgcatgtgcacaaacgcccgcttcccccgcagtccggagcgttccgcagcgccctcttgtgggcggcagcggcgcgacgtcccagaggcagacgcagacacctcgccgcccgcctacggacggtccggacgcggcctcgggtgccacggctgcgctccggctccacgcggcgcccccgcccgagcgcctcggtcgggccctgcccatcgcagccgttctcgaggctccgcctgcggcccaatttccaggcgaccgtttcccggcgacggcgggcggggcggtcccctccgccgctgccgtgggcccgcg

SEQ ID NO: 50463 - DNA, 480 bp, Mus musculus
  source 1..480: mol_type = other DNA
gtgtgtcatatgccccatctgatctcacagactctctggtgaggtttaagccaccacctgggatgtgacagtaacacagaagttattcacaccgtgggtcacttagtcctatcaactttttgaagattcagagtcacagcatcttcatgcataaatgtggctctgaagcccccttcaacccctctccaggggggtagctggggagaaatccaggtctgccccttccttgatggggtgaaaaaggggtctttatatcacctgaactcatcatcggctgcatgaagcacagtcctgggacatgctttatagaatggcggacgaagccgtgggaatagcccggctgcactcgcgcggccgggagaggcctggggggaaccacagcgggacgcctcagtccccgcccccaccggcctctccgggtcgcgcgtgggcgcggcgggcgccgattggctggcgggcgcgcgggcggggcgggtggtg

SEQ ID NO: 50464 - DNA, 455 bp, Mus musculus
  source 1..455: mol_type = other DNA
ggctgtggggcctggtgcccccacctgagcctcagggacccagtgtgtctaacccagtggacctttcaagaaatggctgggccattgtgcagaagaatgcccggaaatcccgcggctccctcctccaccgaggatgggggctcttcctcctggccaggaaactccaagttggcggatggcaaggcatagcctttctatgttcccaggattccagtatgctgtgttaggatcacagcctatctcggagaaccctcaggggttgcgcagcatcccagaggagagcgcttgccgagcatctccgcttggtgtgccaactgtgcacgggggctcagagaaccagacaggggcgcacagatctcctgtgtacctgccccctactaggacagaaactggtagggtctcagactgcggtaactcggggggctgcgccctgggggcagagtccgcccccgaga

SEQ ID NO: 50465 - DNA, 291 bp, Mus musculus
  source 1..291: mol_type = other DNA
ggtcccacttgggacagaagctctcgggacagtgtcggggcccgacgcaggcccgggtgactcggcacctccgccaccaggtccaggccctccagggaggtttgaatattacttaaagtaaacattaaaacacttgataattgatttcacaggatactgtttataatgtttagatagtactctcttccaatttggaaacttattggaaacacattcaaataatgtgtgactgaatttactttatgtctaagagtatattgttttcccgaagtaaagatgtctgcacctccg

SEQ ID NO: 50466 - DNA, 205 bp, Mus musculus
  source 1..205: mol_type = other DNA
tggcgctgagcggaggtgcagacatctttacttcgggaaaacaatatactcttagacataaagtaaattcagtcacacattatttgaatgtgtttccaataagtttccaaattggaagagagtactatctaaacattataaacagtatcctgtgaaatcaattatcaagtgttttaatgtttactttaagtaatattcaaacctc

SEQ ID NO: 50467 - DNA, 375 bp, Mus musculus
  source 1..375: mol_type = other DNA
tgtaattataactgtaactccagttccagatgatctaagtatatgtgttgcacatacatagttatacacacaagtgcactaataaaaatgtgactgcatgtgtagacccttctgtcgcctagaaggatcaaactaggagggatcaaactcgagacagggtctcactaatatatatatatatatatatatatatatatatatatattcctttctggtctagactctgtgtatgagagtctgtacttcaaaaactgaaccacatacggattaaaaataaaaaactgggagaactgaccagaactcctgttttttagccaagccatcggctagacaccaggtagtgtggcctctgactatcagccactcagtgcagac

SEQ ID NO: 50468 - DNA, 627 bp, Mus musculus
  source 1..627: mol_type = other DNA
ccacgactcctgcgtgcactcaccattgtggttgaccccgggctgaagccagagccgtgtccctcagcacgcctgggccatggagctgccgcagcttcctcccgcgccgcccgccctccggccgccgccctcagcgccgccgcgccatcgccggcccgtgcccccagccgccgccacagccgcctcctgcgctcggccgccgccgccgccgccacagccgcatcccctgcgccgctcctcctccggcggctcccgggcaacgccggaagtcacggcgcgccgccccggcgggaaaccgctccctacgcggaccgggccgcctcggttcttcctccgctgccacttggcaaagccttgagatcccgcccggcgatgcagaaccagggtggtgcatcgcgctattgggcatctcgcgagcgccagccgggcgggcgccagcatgcatctagcggcagacggcagcgggccctgagctcgattgagcgctaaaaagggcgcggcgaagccaccgttgcttgcccggggcggggctgcgtcgggggcggggccagctgcgggcccgcctctcggaatcccagacccgcgagttccgggccgaggcctgccagacccgaccgggtacctcag

SEQ ID NO: 50469 - DNA, 451 bp, Mus musculus
  source 1..451: mol_type = other DNA
actctattctatactagacctgtctagtatatgactggttcagtgtggaccactgagtaaacatatccttggatttttaaaaacacgagacagagtttctctgtaaagccctggctgtcctctttttaaaaatggggtgtaatatagccagtccatagtgctggggttgcaggagtaggccaagcacgcttcacacttgttaggcaaatagcctctgcgagcactagcgagcagctacggggcaaagcccgcgcacgcgccctgggtattccgggcagtcacgccacccgctggcgggcagcttccgggagcacgcccctgggcggtccgacctgaggtacccggtcgggtctggcaggcctcggcccggaactcgcgggtctgggattccgagaggcgggcccgcagctggccccgcccccgacgcagccccgccccgggcaagcaacgg

SEQ ID NO: 50470 - DNA, 480 bp, Mus musculus
  source 1..480: mol_type = other DNA
gagacagagtttctctgtaaagccctggctgtcctctttttaaaaatggggtgtaatatagccagtccatagtgctggggttgcaggagtaggccaagcacgcttcacacttgttaggcaaatagcctctgcgagcactagcgagcagctacggggcaaagcccgcgcacgcgccctgggtattccgggcagtcacgccacccgctggcgggcagcttccgggagcacgcccctgggcggtccgacctgaggtacccggtcgggtctggcaggcctcggcccggaactcgcgggtctgggattccgagaggcgggcccgcagctggccccgcccccgacgcagccccgccccgggcaagcaacggtggcttcgccgcgccctttttagcgctcaatcgagctcagggcccgctgccgtctgccgctagatgcatgctggcgcccgcccggctggcgctcgcgagatgcccaatagcgcga

SEQ ID NO: 50471 - DNA, 498 bp, Mus musculus
  source 1..498: mol_type = other DNA
aagcacgcttcacacttgttaggcaaatagcctctgcgagcactagcgagcagctacggggcaaagcccgcgcacgcgccctgggtattccgggcagtcacgccacccgctggcgggcagcttccgggagcacgcccctgggcggtccgacctgaggtacccggtcgggtctggcaggcctcggcccggaactcgcgggtctgggattccgagaggcgggcccgcagctggccccgcccccgacgcagccccgccccgggcaagcaacggtggcttcgccgcgccctttttagcgctcaatcgagctcagggcccgctgccgtctgccgctagatgcatgctggcgcccgcccggctggcgctcgcgagatgcccaatagcgcgatgcaccaccctggttctgcatcgccgggcgggatctcaaggctttgccaagtggcagcggaggaagaaccgaggcggcccggtccgcgtagggagcggtttcccgccggggcg

SEQ ID NO: 50472 - DNA, 684 bp, Mus musculus
  source 1..684: mol_type = other DNA
acatacacataaaatttatattaaaaactgtttttgagaatgctagaacaggtagatatacatatttaacaaaatgaaaagttagattctgacaaataaattttgttgcttgaaactgcattctatttttacaaaacatgcacatacacaaagaaataatgttttttaaatattgtcatagtgatttcaaaacacagttatcagtttgtcagagcatctttatgtagatatactggggtgtttttgttgctatatacacattaacttctctgaactgtaaatatttctaccaagtattaatgcattgttgagctagaacagaatgatattctgttagaattatttaattctaaaatggactgctttgaaatgcatgagtctttaaaacctaggcactctcatatttataattatatcatttcccagatttatcacttttccataattaatatacttaactagaaaatctataaaaactttgcatttttctccttatttattacactgacctacatatttgtaatgctgtgagtagggcattatcatgtggtaaaacataattttcgttactattagcctgaacaattgcttagtaacatgtgaacatttacttgtgtcagtgtgtagatttcacatgacatcttataataaacctgtaaatgaaagtaatttgcattactagtt

SEQ ID NO: 50473 - DNA, 281 bp, Mus musculus
  source 1..281: mol_type = other DNA
caaaagaaacacatgatatgtactcactgataagtgccttcttagaagagcctgctgacaggagcctgatatagctgtctcctgaggggctctgccagtgcagaagtggatgctcacagccattcatgtcttgaagccccattgtagctctagctgtatatatagcttggtcctgcgaaggttctatgccccagtaaagggaaggagatgttcctggaaaaataagtgttttgaggtacagaacaaagcttggctctattagctacctctcatgatgtgag

SEQ ID NO: 50474 - DNA, 600 bp, Mus musculus
  source 1..600: mol_type = other DNA
acctatataaactgacacatgtaactagttccaaatgaccacttgaatatatgtatgtgaatacaaaatacacatgtgttttagggccattaggagtcccaagtaacacatgaaaagaatttcaggattggaaatacgctgaagggcttttaaaatgcagttgcaaaatctcctaaaactagagtttgaaataacaagtgtgttttaaactgattcagcaactactttgaacttactgacttttacaattacaaacccatatttggacttgacatttttttttcttgtcctgttttcagtatgtataactacaaaactgctcaaaataggagctctattgaatgcttctataaggaaaagtctagaacagcatttttttaagcaagcaattagctacaaaaaaaaaaaaaaaaaaagatttatttacttgctccttcagtcctgataatgtcttcctgggctcacacatttggtcttctgaatctatagtttagttattagcaaacaagtgaggcaatcgcttcctggacacgtcaccttcacagaccggggtaggggaggggcgtaagcagctggaggctcctgcggctgcgccccagc

SEQ ID NO: 50475 - DNA, 348 bp, Mus musculus
  source 1..348: mol_type = other DNA
catgtcattgtgtattgttttcagcattaccagaggatatagttagaagcatttttatgatttgaacctgaaatgtcatgccataagcctattacagcctaatttgtaaacaacatatgccacgtggtgttattgttggagactgacccactatcccatcgatatcctggaccaaaataaatcttttgttccttaaatattttttctgtcagataatatgatcagaacgatgtaacgtcatagctttcattaaatctgagcatgtgattcttaggcccttggaaatcattgccctaaaattcagttgatgcaggtataagtaaacagataattgagacttcctgttat

SEQ ID NO: 50476 - DNA, 537 bp, Mus musculus
  source 1..537: mol_type = other DNA
gaagtgacaagttagttctttgagaaaattaacaaacttttaggcaaattaacctaagtagaaggaaagaaaaatgtatgttcaacagtattttttattttcttattttataaacattattattaaaaagcttgtaaataaataaaaccacaaaacattaattattttaatatgaacccaatgcagtctagctgcttccttgcactgctatggcttaacagtgtctgtgcgagacggagacaggatagtttcttgaaaaggcaaacatttacaaagctatcctaggaaacgcttggcaagctgtccagttataaaacaccattgtttagtgttaagctgcaatagaaacaatttttttcagtgtcacataggcagagcctttagacatttatgtatgtttcacttgtttcatgctgtaatctttacgttctagaacacaacattatcaggaaaaggcagcctatttcctgtgtttttcttgttctagtgcagctcttgacagcaagactcatacttgcagctgtttctctggagcag

SEQ ID NO: 50477 - DNA, 436 bp, Mus musculus
  source 1..436: mol_type = other DNA
tcttgctttaagagaaaaccaaaggccagagtggcaagcagtttgagctttttttaagttaatagaacatgaaaaggagcaaaacatcttgaagaagattccatgtgcctcggaaaataaaggtttgttacaatttttgttcaactcctgcatctgattaagacaaaaattaaattaaatttaaaaagtaactgaggctctgataggtgatttcccaagtgtgttagaacatggtaattaaaacaagccttattccaagctctaaggttggctaagtcctttgaaaacaatctgatcaagatgcattcctttaatcttattctaccttaaataaatgtttggggggttgggtttccgccctctagcggaacccagatggcctgagagaatgctccgggaaggcggatgcctcccccccattggccaagggtgggtg

SEQ ID NO: 50478 - DNA, 397 bp, Mus musculus
  source 1..397: mol_type = other DNA
tagctgcatctacattaagtaaatctacaaaagtaaatgtttctacagagaaacagtgtctcaaaaaacaaaacaaacaaaaaagttttcaacgttttcaaaccttcaccctttggggggaggggggaccactacacctcagagacagggtttctcgagacagggtttctctgtatagccctggctaccaggctggcctcgaacatatatatatttatgtactttgagacaggggtatatagttactagcaggaagacaacggttggccggctcaagcggtcaacctgaaggtgcgacgcagagtcaggagcagctttagccccccgcggccacgccgccccgaccccgcccccaccgcgcgcgcccgcgccgccccgccctcgaggtgacgtgcgg

SEQ ID NO: 50479 - DNA, 347 bp, Mus musculus
  source 1..347: mol_type = other DNA
ttcagtaaaggttttcccaaccttaactgtcagtctggggtgttaaccagcaatggtatgtcactccagttgggcccagactgggcagtcctcctaggtggccagaagttgtaactaccaccacttccatctgagtgcatgcctgaccttcattcaggctggattatagccctgcaatttttgcagccacccgtgtccaatgccaacagagttctctggtcttcttgatggattgattgttccttaaaaaaaaaaaaaaaaaaaaagcccaggtctgatttctgagctcacattgggggaactctgggtttaggactgcccgcaggccgtccttgcggggctcaggg

SEQ ID NO: 50480 - DNA, 393 bp, Mus musculus
  source 1..393: mol_type = other DNA
gagttaaaaagtctcttttactataagtgaggtttgtatgccatgcttaggtaacattcttatttgaaacattcctgtagaaagggaacattgttctcaaagcaaatgttaattgtgctgggatacttgactctcagttgtctagagatcaaccagactcaggtgtagagcctgagtttctgggggcaccttatctttatgttagacctggaagatgaacgtggggagtcattgaatttcatcctctgtacagggccatttcccttttctgagactataaagcacagtgaaacggtgtcttgtggttaaatgtgataacctgagggtgtctgataacacagcgttggaactgaacggcctccaggtggcgctctagagtgatttctaggccgg

SEQ ID NO: 50481 - DNA, 276 bp, Mus musculus
  source 1..276: mol_type = other DNA
tgcagtgcactcatccactaatcgttagatggagaagtgcttcacttccagaggacccatgtctgtgccagctcagaagggccttgatgcagtggccctcttctcttgggcagagcagcagttcaggggttagaggtgcagctgcagcacgaggcagcagagcagtgggccagggcaagcctgcctatccttgtgctcgcacatccctgcagagaagtatacattgtgtgtgtgtgtgtaccatcaactacagttctgcatgtgttcacagtcaac

SEQ ID NO: 50482 - DNA, 394 bp, Mus musculus
  source 1..394: mol_type = other DNA
ttgatttccccttggaaagtttcgcatagtgcaaacagctgccaagggtgctccacactgctgccctgtgtggggaaatgcttcactgcaggccttcctactgagttgcatcactacaggaggcgaggctttggccttggattacttagtctcagaatctgaaatcccccatttgatcaggttatttactggggcttgacatgacccaagagacctcctaggacattagtaaacaatttggtattaagttactttcataaaaactgaaagagactatttaccccagaaacctggcttccggaattcagcgttcttacagctgcagactatttttgccaacctcaattttagctaaggatgccagcatccttgcccagcaggcctagaatctcgc

SEQ ID NO: 50483 - DNA, 313 bp, Mus musculus
  source 1..313: mol_type = other DNA
actttggaaattgcgattctggcatttcactacttagaagtcaaagttcctgactggcacgagatgcgcgcgggtactgtgagcagcctgcaccccatcccgggcaccagctcttgcgcaagctttgtgcatcgcgctctccacgggagaaacggggcctgtctcgttccgatctcgcgcggtccccggcttgttggcgacctcgcgggctgtgcgcggccggctccactctccgcgcggccaccagggggagctgcgttcgctgtggcctgtgctcgcaggcccggggctggcatgggaacgccctagggcc

SEQ ID NO: 50484 - DNA, 442 bp, Mus musculus
  source 1..442: mol_type = other DNA
aatgtggaacaatcagtcaatattaaaccgttcattaactcagagtcttcatgatccaacttcctgaaagcccagctacatcctgtcaatagctaactaggtagttgtatgatggacaatccagtttactttctttttaaatcccttaaatgggtaaccataaacaagccccgggtagtttatagagtagtctttatattatgatactaaaatagataaaatagaaaaaataaaacgactaatgcctcgggagctttacatttatttataaaaatagattgattagttagtatatcattttgactcactttggaaattgcgattctggcatttcactacttagaagtcaaagttcctgactggcacgagatgcgcgcgggtactgtgagcagcctgcaccccatcccgggcaccagctcttgcgcaagctttgtgcatcgcg

SEQ ID NO: 50485 - DNA, 232 bp, Mus musculus
  source 1..232: mol_type = other DNA
actctcaagacagtttcagggtgactttctttgaattgttttccacaggcatccagtgcccggtcgaaagtgtgtcggacacaagtgctcttaactgttgagtgactactctgggcagaggagctgtaggctcctgcccagcgatcacaactaagtagacaacggtgggatctcacccctctggggtgcatacacctcccaggccacgccctggtcttgcacggggtgggtg

SEQ ID NO: 50486 - DNA, 476 bp, Mus musculus
  source 1..476: mol_type = other DNA
gaagctgaaccaccaactgactataggtagttttgacatctactgatacagggtcgactggctggcctccaactcagagtctaagagaggagtttcctgctgtcctgaagctctctgtaggccaggctggcttaaagaagctcagtacggtccggtggcagcaactgtgctgtcagcagaatccaaaaatccgagttgaagccacccggcatccagggaggttccgccagtcccaccgggctgagacttccaggtccagctgcctgaacccggagcacaggggacccagcgccgccctgtgggtgggcgggcagtcggccgcaagcagccagcgcggctcggaggcggggcggggccgcactgggctcggcccagagccgggagggcccaggccaccggaagagtcgcgatcgccagcggagcgccggggtggcgggcggcgctgggacccgggagcggccggagaacaagggagc

SEQ ID NO: 50487 - DNA, 462 bp, Mus musculus
  source 1..462: mol_type = other DNA
catgtgccaccactgcacagttgagaaatgggatggctgtcctggaactcactttgtagaccaggctggcctcgaagtcagaaggagaaatgggattttaaaatcccatgcccaactaaactgaggaaaacattaacgtttagctgtgtttggataattatccctgagaaagggatcacaatcctagaatatatataaaatacatacaaataaattttatatatatatataaaaacacacacacacacgttgtcttcgaaatctggagacaataaaagactatagtaattcaaaatttacaattggtttcgacaaatagctttggtcggggtcgcagagactacacttcccgtgattctcagtgaagcaaacaatggttggagtgtatcacgacacgtgttgcttgcaaggcgcgtagtcgccgctggaggcgagcgcgcaggcgcagctgcgatcggggcg

SEQ ID NO: 50488 - DNA, 344 bp, Mus musculus
  source 1..344: mol_type = other DNA
aatgctagacctaatttttgtcacacttagaaattttgaaaaaggggctcagcattgaagagttcttactgcttttcaggccggcacatgtaccaccctaactcaggcttgaggggtggagggcagtgttcagtctaacacctagcttccacacatacagcacactggcatgtacctgtgtgtcggtaaaaatgaaatcttttaaagaacttattaagcgttatgcctggtggcaggcccaggctcaagccctgcatctgcaggcaggccttctctgtggctgagctcggccttgtggttactttcctcagccctcagaaaaggctgaggcgggcctgtacagc

SEQ ID NO: 50489 - DNA, 389 bp, Mus musculus
  source 1..389: mol_type = other DNA
ctgtttcttgcaaagaaccagggttgtgcatgtcatttatgtgcattcatgtaggcaaagcacacgtgtaccttccaccacgtggatcccaggaattaaactctggttatcaggtttgccttacccactgagccatccctaattgtgtgtgtggcatggctccaaatagtaattttaacaaatggtgtgagttattgggtgtctatatgtaaaacaaacaaaaactgggtgaccatcctagaggagattttacagatcttcctaatgttttgcagtgagaacacgcgaaaatcctgccttcaaggagcctgtttttctgagcccaccttaggggaccactgctgtgacaggagcagcccctggaggccctcgtgcaaggaagccgtcct

SEQ ID NO: 50490 - DNA, 409 bp, Mus musculus
  source 1..409: mol_type = other DNA
atgctgatagcttttttaaactttaacacgttgtcacatgcctttaattccagcactttggcgacttcttaagttagcttaggctctctagagagattgtctcaaatttggcgcattggaataaagttgtctaattttgcaaattgagtgtgtgtgtgaggtgtatcttttacagacacttgagatctgctttgtctgtagacccaggataaacaatgaacttataaaagtcattctcaacagaagtgtgctcctcacccagctgattcaactagcaggactaattgaaactgatccactctggaccgagagttggctgagtcacgcgcaggcgcggaagctgccacgcctgctggactccgcggcgcttgcgtcccgttctactaggcggtcctaggcccaagtctca

SEQ ID NO: 50491 - DNA, 423 bp, Mus musculus
  source 1..423: mol_type = other DNA
gggtgaccatcctagaggagattttacagatcttcctaatgttttgcagtgagaacacgcgaaaatcctgccttcaaggagcctgtttttctgagcccaccttaggggaccactgctgtgacaggagcagcccctggaggccctcgtgcaaggaagccgtcctgctttggtgagcacacaaacgaaggtgcagtgagcgggagtccacccagggcggggtgcagactcggccgccctgacctccagaaggatggagagggggcgctcagcttcactctctgccggcctgagctgacgcgcggaggcggtgcggtgcccgaaggaactgagccgcagccccctccgcagtggcgggcggggcagaggcgggctggaggggcggcctcttggaacccgggcgggactaccagccagcagcccggc

SEQ ID NO: 50492 - DNA, 293 bp, Mus musculus
  source 1..293: mol_type = other DNA
tgggatttaagccaccatgttgtctgaaggggaagccagctttctatagatagtgagagcctggctcagagccgacacagacctctaaggtgtgacactcacctcactggcaagccagtgggactgaagctgagctctcaggcatgtcacagcaggctcaaatgcagtggccctactgtaggacatcagggaggctgttctgcaggtgcctgggacctggacctaaatgacaactccaagtcagcattgggggagcccatatctcctactggagatccagcctcttccaggct

SEQ ID NO: 50493 - DNA, 536 bp, Mus musculus
  source 1..536: mol_type = other DNA
agcgctggtcccagtactggacttggcggtactggaagttcttctccggtaactccggaggggacaccggagtccggggagaggccatgctcagggcagcgccgcagccagggcggagcctgtgtctccgccaaaccggatctggtcactagacgtgaccaggctcattttccaataagaggcgtgattaattaaagatcccttcttcccaagatttttggagggaagggggaatactgaaaggagctttcccctctacgtgcacaactactctgggcatagagaagagaacagaactgttgttttgttttctgggcaaacactgatatactcgtgtttatgtgctctgaaagggacatacaccgagaagtatatgtatatttatattacaacatcgtgtagtctttcaaaggagatgcgttctaaggactagctatcttatccttatttgcacatattcacattagaaatatctctcaccactgtgtataataagcagtctaattaacagactgatttttagtaaataagacttc

SEQ ID NO: 50494 - DNA, 494 bp, Mus musculus
  source 1..494: mol_type = other DNA
caggcagtttccagattcctgccggctggccgacagaagccggctggccgcgtttccgcagcccagcagccatgaagtcttatttactaaaaatcagtctgttaattagactgcttattatacacagtggtgagagatatttctaatgtgaatatgtgcaaataaggataagatagctagtccttagaacgcatctcctttgaaagactacacgatgttgtaatataaatatacatatacttctcggtgtatgtccctttcagagcacataaacacgagtatatcagtgtttgcccagaaaacaaaacaacagttctgttctcttctctatgcccagagtagttgtgcacgtagaggggaaagctcctttcagtattcccccttccctccaaaaatcttgggaagaagggatctttaattaatcacgcctcttattggaaaatgagcctggtcacgtctagtgaccagatccggtttggcggagacacaggctc

SEQ ID NO: 50495 - DNA, 398 bp, Mus musculus
  source 1..398: mol_type = other DNA
tcccctgaaaggcggtgcaccacccccaggcccgagctctgagcccagggctgtgttcacagccagcctggccgtcgccttctggggccccgccgcgcccccaggtcgcctgcaccggccgctgcggttcccccgggcccacgtggcggccattcccggccacctcgcgggaacctcccacggccgcgcgttccactccagggatcaccggactccctcgaaccgctgggccgctggccggcccgcgccccgcccgccgttctctgccgcagtcgggcgctcgccgccgccgccgcccccgccccgcccccgcccggtccccgccgctgccgccgccgcctgcccagcggcccgggaggcggaggcgcgggggaggaggccccgctcggctccgcagt

SEQ ID NO: 50496 - DNA, 333 bp, Mus musculus
  source 1..333: mol_type = other DNA
tgtgaatcaataaatgagtatccattgccactcactacttaagggaagaggaggcaatgctttggtgtccccgagactgtaacacgataccacactacctcccaaataaaatcgcttgccttcctgagttatgagatgatccgatgacggcaattattttctgtatatacattgtgaaaattcagaatagtatatcctatggacacctgtatagaggtgaactgcctgtggtttcctgctgtatttaaaagtattgaaggcctgaaattttgggcctcaaccaaatggaagcaaattatgcttgcctgaggggctctcaggcttgtctgggcg

SEQ ID NO: 50497 - DNA, 685 bp, Mus musculus
  source 1..685: mol_type = other DNA
ttatttcaaaacaatgtattcctacaaaataacttgaaatatatcccaccaattcatctccaacatactaattggtatgtgactgttgattatatatatatatatatatacatatacacacatatatacatatacacacatatgtatacatgaaatatacatactaaatatttatataccatacatatggtatgtgcctgatatatgtatgcatgtatgtacgtatgtatgtattcttatctgtgatagaagtcatagaaacagaaagtagacatttcctacaagactaacggctatagaacaggcagagcagcaatgggctgttcaatctctctccaaaggctgaagaagtcattggcagtggcgcatcagcagctcatgtctgtaatgaagttattctctgctagaaagtaagttcgaggctgataataaataagtaaatttcatcttctgcggttactattccacagtagtagtggcataattacactcggtcaagacttgaagagttttgagctcagcatgaacatgtatggacgtcctgtcttcaggatgctaggcatctctgcagtcagacgctggaagccggaacagtaattcccgtcctgctccagagggcgggactcgggatccgcagggcgcttccggtctggaggacaacgcgcgtggccttcgtgcgagcagg

SEQ ID NO: 50498 - DNA, 410 bp, Mus musculus
  source 1..410: mol_type = other DNA
agttcaaattttcctatttttaaaatttaaatatttacgtgtatgaatgttttgttttcatatgtctgtgcactacatgcatatgtggtgcctttagcagatcctcttgaagagcaggctggccttgaactcagagatgagcaactgatttttttaaaaaaacaaaagtaaaattgcttctttagattgcggcagttatattgaatttcctttgttaataggtctatcaaagatcaaatctatagcattttcagaggctgcataatttgcacacgctcaataaatgcttgcgcaaagagcctcagagggggtgagcaaatcccatgtgcttccccggcgccagcgcagctccgccctctgcgccggtcacgtggggcgctggctgcgcctgcggagaagcggtggccgcc

SEQ ID NO: 50499 - DNA, 359 bp, Mus musculus
  source 1..359: mol_type = other DNA
gacttctggaccaggacataatctttgtctgacaggcaggagttattcaagttgaagatgttaacagaagcaataagcagtggtcaagctacttaagaaccatgatgaggagtccctggaatgcctctgccgcctccggcaaagacctggactttgcaaaagccaaggtagagtgatctgatccatttgcttcctagcctcgaatggatcagtatttcaaccaaaaaaaaatcacctcatctcgcatccgttttatgctgcaggatgtactcgatcttctttccactttgttcccaaagagtaattgtggccctccaggcccgcctatcagtgagtgtgaggctcgggcaggagctcct

SEQ ID NO: 50500 - DNA, 387 bp, Mus musculus
  source 1..387: mol_type = other DNA
ccctgctcaggccttcttttccatgaaaacagtcaatcacacaaagcattagtatggttgatgtttgatgggatttgtagtcccagaaataacctcgtgggttatggcagccgggcgtggtggcgcacgcctttagtcccagcactctggctgaggccagcctggtctacaaagtgagttccaggacagccagggctacacagagaaacagggcgctctgactcctggtctgcacggagttcaggaagtcatcctctcctgtagtcagggaagagtgtgactgacctcaggactgtaccaggcatagccagtaacctttctggggaccaccaactggctgaggcccagggacagagacgtctggcgaggtccctggcactcccactt

SEQ ID NO: 50501 - DNA, 368 bp, Mus musculus
  source 1..368: mol_type = other DNA
tctaactaaaaacgcctggatgatttagactagagtctcactggtcctgagacaggagacactgctatctgagggatgtattcaaaactgacatctgtcttaagacattaacttgttcttaggctaatacaatctactttttccaaagctgtctcaagtttctcattcacgaaaaaaaaaaaaaatggggcgggccagccacttggggtgggtgggcatgttggccacttccctcctaccgccgatgtctttcacatcgaaaatatcctcgaacaggatatgtgagcgcgcggccaccactggggattcgcgcaccccctcaacgaggccgagggcgcgtgcgcacgggctgcagtcacgcagccact

SEQ ID NO: 50502 - DNA, 447 bp, Mus musculus
  source 1..447: mol_type = other DNA
gtccttcccaggaccccgaaagacaatgtggagcagcggtgcctgggaggagcgacctctgctcccccccccccccccaggtgcaccttcccgggggaacccggaggggagggagccggctctcgggcatcctcccagatgcgtctgagccgcctgaaactcccgcacaacgctgcagccgcgggagagcccgtcccttccacgcccccgcccggcccccgcaccctcagggcgctgggttaatcccgggcctccgtggcgaaggggtgcgagatcgtgtttcaagcgccccctgccgcctctccggacaccaggaggcggccccaatgcagaccccggccgggcagggacgcccctgcagatgggccggggcggagcagcaaagcagggcaccgccctcggcccgcccgccgaggaggagacgctagcgggaggctgagcctgcgg

SEQ ID NO: 50503 - DNA, 479 bp, Mus musculus
  source 1..479: mol_type = other DNA
gctgtcgcctcgcacccaggggagggcacaatgcgggctttcctttccccgacccaaaccggacgcacccggctccggtgatgtctagctggtccgagccagctcgcaccagcttcaccgggtcctggagggctggtgctctgcgggcctccacctgcctgcagcgcggactgtgccctcggccggcacgcggacttcagggaagggctagggccgggcttctctgggccaaggatcaaggttcctggctgggttaggcccccaagctttccacgctttgggatccacaagggcgccgtcgagccgggcgcagcgcggtaccccgtcggaggtgggacttaatctgtccccgccttggacggagtcaccgagttttgagactcgcccacaaggcccgagcacctcggaggtggcccttcccggcggaagtgaagtggctgcgtgactgcagcccgtgcgcacgcgccctcggcctcgtt

SEQ ID NO: 50504 - DNA, 351 bp, Mus musculus
  source 1..351: mol_type = other DNA
accaggctggcctcgatttatttatttttattatatgtaagtacactgtgacactccaggagagtcgatggttgtgagccaccatgtggacttcggaagagcagacgggtgctgataacgtgatcattttctaatataggcaatacctactttgccagttggaaaggggccagcatgctgtcagaaactgagttaaacaagacctctctttcccagagagaaccgtattctgccagaggttctcatgtcgccaggacatgagacagttcccgctatacaaattctctctagagtgtgtgtgggtggctattcatggaccatggtccagccatgggctcccctactacagag

SEQ ID NO: 50505 - DNA, 403 bp, Mus musculus
  source 1..403: mol_type = other DNA
agggaagcactggagtgccacaggcccgaggctcagcctctgccctttggtcttggggtggacaccacctccaggggtggtcgcaaggagcgtgtgtgggggtgtcgaggcccgcctctcctctccgcgatccggccgctgctgctgggccggaccccccgggctcagccgggctccttgtggagccgccgccgcgccccgtttgctgaagaggaggccccgggcccggacgcctggcgcgggcataaaacgggccagagccggcgcctagggcactaaagtggagtacggcccgggtcagcgcccctccgcccgctctctcccgccccgcccggccgggagccgaccaggcgactgtgagacgagcccctcgccccctcctgccggcccgcctccggtccgg

SEQ ID NO: 50506 - DNA, 455 bp, Mus musculus
  source 1..455: mol_type = other DNA
gtaaccttgttcctaaatttaaaactattggtcaaatacacccccagggctgtccagtcggagtaagggcagcccaggcagaacctggcctgtcatagtgctgattaagactcattatgaatataataaatataataaggattttgtgtcttttatcgagattaaatatttactacaacagagatcctctgtaagagctgaaatatctcttaacactgatttaaatgagagaaacatttaatgtttaatatataacaagatttaattttatttaaattttaattagatttaaacattaataattaatatttaaatgagagaaatagcctggcacccttccctgtccatgatgggatgggcatgaggcttactgaaaggaagggacccaatctgcagtccctgccacgtggtacagaagctgaaatctcagtagcagtaagcccccaccctggggt

SEQ ID NO: 50507 - DNA, 495 bp, Mus musculus
  source 1..495: mol_type = other DNA
ttatgtcactgtctttactgacagtcctaatgtacttacaggacagacctacagtgagccttgggttaatgataccatatagtggcaattgtaaacgccaaactatcctgaaatagctttttccagtagcatattagggaaaaaaaagatgccttctctatttaataatgtgacccactctattattttttgatggaacaatgacaactaaaaatgataatttggaaaagaagttttcagtatccatccttatttgcaaaaaattctgtgttcacctttcaaaagaaaatctgagacaggtctgtgtgaaagggacgttccttttaatctgaggacctagggctccttgagcgtccctggaggccggacagagtctccctttaaggagggcgtgacgcagaggctcgcaccgcccagtgcagggcgtctctggggagagcggaagcgcgcccgccagctgccgagactgcgcgtgcgtgggctggcctccgcggg

SEQ ID NO: 50508 - DNA, 415 bp, Mus musculus
  source 1..415: mol_type = other DNA
tttttcacgaaaatctttgaaacattgtgggtgcccaaaaaatattttctaataaattatcacaatcgaatagacgcgggctctgccggggtgggtaattcccacgcccccccatgggtctgctaaccacaggggggcgcccccagctcgttctatctggttatcaccgtctaggactggagctggttactaatcgccaataggagagaggggcggggttacccgattgactgacagtgtggctccctgctgcaagccccaggacgccgagggtgggctcggtggctccagcagagtgctctcgcagcagaaccagctggctgggcggtctgtgagtgggcggccggcctctgggggcgtggcctgagtgttgacgggcaggcaggtagccctgcccctctcgcccagagcggcc

SEQ ID NO: 50509 - DNA, 333 bp, Mus musculus
  source 1..333: mol_type = other DNA
caagccatttaatggatttatattaaagccttcatcaggttcctaggatgctgggactgatttctcctagacaccatacctagaagtaacattcctagaaataatatttagacattgttaaaacttgtgaaacatcagtgaagatttacaagtacggttttacttgtcaacacttggtggactttggcggctgcagcctacgtccagcccccgggcgcgctccttggagcgcagcccgccccagggagcacgaagtgcaaggggcaggaggcggtagcagcggctcccattggctcagagcacgcccctcctctcagggcggcccagaaaagg

SEQ ID NO: 50510 - DNA, 433 bp, Mus musculus
  source 1..433: mol_type = other DNA
ctcccgtaaacgaaagattcatttttctcggacctgcagcctaggcagccacacccattggctaggctgggccaccatgtaatccatgcataaattccccgcacccaggactagttccgggaggctggcacagggaagaacccgcgaggtcatcgcccgctgccatccggcggctccaggacagcccgggcgagtgtgtgcccagcaggacgccacggcgcgacggaccaggctagaccctgtgcctaaaggctgcgggagaaggccggactgtagccggaggtacgccctcccaacccgagggcgtaggggggcatgtgggacccgctggccgggggcagaggcgacgcgcgcaacgccaccgcgaggggatgggctcgcagaggggcgcggcggtctaagtgtgcgcgtgcgcgtgcaggcgtggcggccc

SEQ ID NO: 50511 - DNA, 365 bp, Mus musculus
  source 1..365: mol_type = other DNA
tttccttctctgtgataactccagctttgtcaagttgacacaaatcagtggtagtaatagctggaactgcagaggtctgtagttttgttcctattaaccagttaaaaacaaagacagctccctgcttttctgggtcagtataggtttgtggacacacacacacacagagactttcttattgatgagtatgtctactttcagggacagcctgaggtctgtcattatagtttcaatcaagttgagataatacacgtatgtgttccagtgcgggttcattgcaagtaacacaacagcttcaactgctgagccgtgtgtcggaagtgacgtcatacgcggaagctgtggaggcagaggtggcgcctgcg

SEQ ID NO: 50512 - DNA, 345 bp, Mus musculus
  source 1..345: mol_type = other DNA
ccatgtgctgggactgcaaacacacaaggcttccctgaaggttgccttacttagggccacctctgcttgctcatccagagagtaaacgaaaagatgcttctcttcaagtgctggggtcagtcacatgaacaccatgtcacagactctttctaagactcagatgtgtgttacagctagtgtgtgcacgctagctcctacacaagagtgctcaagctaggttgtggcccccagatctcccagctctgtcacagggaaggcgttggaggtgcgatcagtccctggcgggggcggggcctgcggcgggccgagggcggagctttgcgagggccacgccctgcccgtcca

SEQ ID NO: 50513 - DNA, 298 bp, Mus musculus
  source 1..298: mol_type = other DNA
ctgtcaagaagcacttgacacaggcacctcgactactatttttaaggttttcaaatacccagaaacttatgattaggggaattttcactgaaagatgtagatgtgttcttcccctttaagacgatcctgaactcaatgaaatgtttttaataaaagtctaaagacagctctgtggagaccttggagttaaccggatttgtcatccgggattcattcataaaggaaaaggaaaccttttactcggcatccttcaaatgcaaatgacacattaacatatgcaccgagcctccctcgggga

SEQ ID NO: 50514 - DNA, 297 bp, Mus musculus
  source 1..297: mol_type = other DNA
aatcattcagtccctgtttctatttatcacataagcaggtgaccttgtattctaatttataagtatctatgaaaaacttgcacgtatgcgtgcggaatgagccctaactttggtttttatgaccccagcatccgagatcgactcctgactggctctgccaaagagaaagccccgcccttcggtctgccagtcagacccgcgcaaggcttcctgttgctaggcttacaaggagcaggcccagactgcgcatgctcagactccggaggactgccgatcctggctacggctgaagcggcg

SEQ ID NO: 50515 - DNA, 435 bp, Mus musculus
  source 1..435: mol_type = other DNA
ttcatcagggctgcgaccttgatcaaatgatgtctaagaagatacttggttgacattgactcttctttcagacttggaaaataaatgaatcatgacacaatgaaaagagttatttacatgtttatattacattcatttatgttgtcaaagttgcttctcctcccagctctttcaaactttttttaaaaaaaaagttaaaatcattctccatacatttatatacaaccaataaatgcatgtaatttaaaaaaaaccaaaaggtattcttagtttgtttaatattaaaacaaaaccctaagacaaagacatggctggctggttgagtaaagtacttttattgcaaggacgattatatagtaagattctcttctctaaaacataaactcgtttgatttgattttaatttagtagtaaataatttaggatgttattata

SEQ ID NO: 50516 - DNA, 580 bp, Mus musculus
  source 1..580: mol_type = other DNA
ttatttctaaaataattctggctttacacacagttttcattaacagagggttcaattaatgtggcaagtttaagaaaattgtttgcatacttttttcattgctgactagacaggtataagtctctttaaataagaatgcctgttaatattgtggctattgttaaaatagaaagtggtattttcaaggcgcaaatgattttacaaggtaagtactactggttttgctgaaatttttttttttttccttttcagcaaaaccacaaacatgctaaaaatgaatacttttaaccttgactttgtaatttggccaagtcattgattttattgttaattagtatttatacacattatcattgtttatcaggtcaaaattgactagcaacttatagtctccaaatcattgctttggagcttttctgcattaaaagacacttgaaaaaccaaaaccaaaagtttttgtgcttagatagtggaaagaagtttctaataaaaaaaacatgtgcttttgagagaaagaattgttaccaacataagtttaaagtttggtattttttgcaagtttataaaaagcagatttttt

SEQ ID NO: 50517 - DNA, 391 bp, Mus musculus
  source 1..391: mol_type = other DNA
tccccaggtgggagtcagggtggggaatgagctggaactcacagagatccgccttaaagataggattgatagttcataactattaggctatataacatacacggtgggttcaacacaatgaggctttgtctcaaacctcaatttagcttctccgtgtagaccaagctgtccccaaactcagggatctgggattaaaggcatgcaccattaatgcccggtttaaattgcgagagttttaaatggaggttttatttaggaaggaaagctctagaattaagtctgttctctcctagcatggaggaatgtacaaccatctcttctcttcggacggttctctagaaggttccagaaacacggtgtcccactttcccgccacgctgtggccgggtac

SEQ ID NO: 50518 - DNA, 444 bp, Mus musculus
  source 1..444: mol_type = other DNA
ttcaacacgcccctctaccggcccggtgcgatccacgaaccgggtttctggctgtagcctcttgcctgtagagctcagaggcatcaggtttttaaaggaaggtaactacttttttttcccactggaaacctggtttaaaaaaaaaattaaggcttctcttcaaggtacttagctcgctgctgcagctgcgaacgcctggcgccaagcggccccgcgcgggggtggcgggaggagcgggaacttcgcgagtggcccctttaagagcttcactgactcagctaaggcgttttttatgaatgaaaaacgtccttacattcattatataaacaagcagccaatgggcgccgcagatgatggggcggcccaggcagccgcggggatggccgccgaccaagctgcgggccaatggcggcgggcggagccggcgggggccgggccagtgct

SEQ ID NO: 50519 - DNA, 234 bp, Mus musculus
  source 1..234: mol_type = other DNA
ctgacaagtaccagtttaaactagttttgaggttcaaggccagcctggtctacatagagagagaccctgtctaaattatcttttattgcttacttgtaattaacatataaagaattaggtttcattatattgttctgctgacatacacagaaacactgtaagtttattgagtaggagagagaatgcataaattttttttgtctttctgtgtcataaaatattaatgtcattttt

SEQ ID NO: 50520 - DNA, 319 bp, Mus musculus
  source 1..319: mol_type = other DNA
gtaggaagactacccaaaaagacaaaggagaaaaatcataatcttttgcagaggagaaataatcaccaatctgctgccactgggtcaagattgtcagaaatgtccttctggacgggatcgatgacatagaaaacagagaacttgttgatttatttttatgttaatagacccctaggtttctaggttcagctggtttctcacagccaccaaccagcactctgacaaagccctgccagccaggagtgccctgagcgcgcgggtgtgtggcgggggcgggcactgcgcccggggggcagggctccgcagcgagagtggcagc

SEQ ID NO: 50521 - DNA, 303 bp, Mus musculus
  source 1..303: mol_type = other DNA
tgctatggcaacaggtgacttaaagtgacttctggcacttccacagtggactttttccgctctggcccctgtctctcacgaggaggagagagcgtacctaagagggactgtagaggaactattactttttatgttctagcacacctagagaagccacaattgtatggcgctctagctctagtcagccagggctctgtggtggaaggcctggcgcttgcgcactgagcgaggggcggcggcagcagcagcggctgggcgggtaatggggaatgctcctgctgcagctgcccgcagactcagttt

SEQ ID NO: 50522 - DNA, 426 bp, Mus musculus
  source 1..426: mol_type = other DNA
tggagccataggtgagctgaccttggaaaggcaagattcctgaagactgaaggacagtcgccatgaccttgaagccagcctcaactgcacagtggattccgaggttaggtcactgaactcctgcatgctctgtgagtagagcacccaagcttaggagtataaaaacagacatttttcttacctagttttatggcagtaatcaaatttgagtcaaacattgatatatctaacataatccacacttaaatggcactcatgacccttagttcttagtgaatttgtttacccagaaatcaaggatggtctttggtttcttctgcactgttgaataaaaaaacaaactgcacagagaaaatcttggttttgaattttttcatcaatagactctaaatgactgactcaaattttggatccaattctcatgaa

SEQ ID NO: 50523 - DNA, 503 bp, Mus musculus
  source 1..503: mol_type = other DNA
ttgttgcaaactgggtaacccacagtcccactctggaactcagacgtcaacctggccctgcaccgccagcctggccaagggccgcccctcggcctcttgctgcacgcgcgggagccccagaaggtgctcaggttctgcggggccatggcgtcccctcagcctccggtgccgctgcgtcggctgaccagcccttccggcccagggaggccgcctcacgccggggtctctctcttgcccggccgcggagacaggtagcgcgccccttcctcagctgccaccttccgggagccccagagccggcgagcagccaggcgtgggccaatcgccgccggggacatcacacgcggccgcttcacctccgaggcggcgcgggcccagacagcagaacagccgtcgtgtccgccggccaatgggaagagaaaacgtcagaggttcgcgccgcccggaatccaccaatcgcgaggattccgaccaattgcttgagagaggtcttactaccagtc

SEQ ID NO: 50524 - DNA, 396 bp, Mus musculus
  source 1..396: mol_type = other DNA
ttccctagtgcgctcccgagtgcacacaatcatagaataggttatgcaggaagctaagctgagaagctgtcctaaacaactagttgctctagtgctgattgcatgcttgctgtgtgcaattctgctaggaaacttgcaggaaaaaaaaaagtttaattaattcccaacactgatggggctgcctcaccgctacgggtgagcgctcgcaagtcacgtgtgcacatgactggtagtaagacctctctcaagcaattggtcggaatcctcgcgattggtggattccgggcggcgcgaacctctgacgttttctcttcccattggccggcggacacgacggctgttctgctgtctgggcccgcgccgcctcggaggtgaagcggccgcgtgtgatgtccc

SEQ ID NO: 50525 - DNA, 216 bp, Mus musculus
  source 1..216: mol_type = other DNA
atttctgaaacctgtcagtccagaactccatggtgttgcacttgtgcgccacacagaagacacagagcagtgcctgcctgtgctgttccctgcacttcttgagggagatcaatcatcaacgttagaagatttacccagagcatgctatagccctatcctgctcatagccactgcagctgcgctctgtgctggccacagcagcattggcagatctgt

SEQ ID NO: 50526 - DNA, 417 bp, Mus musculus
  source 1..417: mol_type = other DNA
tttcatctgaaatgtttaactaattttacagttctgagcacggccaacagtagcagtgttctaaaattcaaaactatacaaaggaatactcagaaaatactgatgatttggagaaatctcaagtactgcaggatgacgggacctttgatgcagccgatgcccagcctgctgcgggcagccagagcctttctgggtcactgtgtgtacagtactgactatggtgagattcagcagccttgggcatcagcagctctgggtggagaaggccctgtgcagggaagccacagcctatgggtgggacccaaagtgcgggcgctccttggaaagacacggaacctaattagagcttattctctctaggaccttcctctaattcatagttagggtgtatgtcagccctgaaactcagctaagcag

SEQ ID NO: 50527 - DNA, 339 bp, Mus musculus
  source 1..339: mol_type = other DNA
taaacttgtacaataatgaattttaatttaaattccagagcctccacaacaggtctttaaagatatttctaaattggaaaaaagaaattctgtagaactgtaatcttcagatttgggtttcataatcaatctttactaaccacttgtttacggaagactaaaaattctggaggcctggagggcctcccctgacatgggcatgccccacccctgagaaatctctgtaaaggcgccacctctccacaggttttcgttttctgagctttgggaacgtgttcaaagcacacgctcagccagaacctgtgagtcacaggtagctgctgtgttacacaacatcta

SEQ ID NO: 50528 - DNA, 404 bp, Mus musculus
  source 1..404: mol_type = other DNA
cacagaggtatgttcactgctggctgaaactaaatctctgctgaacctcagagtttggatatctgattttttttaactgataaaggaaaacttaagcacatttaaattgaaaaaaattaaagcattcattaatttatgagtcccagtattgtggtaaacttgtacaataatgaattttaatttaaattccagagcctccacaacaggtctttaaagatatttctaaattggaaaaaagaaattctgtagaactgtaatcttcagatttgggtttcataatcaatctttactaaccacttgtttacggaagactaaaaattctggaggcctggagggcctcccctgacatgggcatgccccacccctgagaaatctctgtaaaggcgccacctctccacaggttt

SEQ ID NO: 50529 - DNA, 434 bp, Mus musculus
  source 1..434: mol_type = other DNA
ttccttcaatgatgactgttgatatccccacataggcttatatgtgtcggaatgcgggtgggctttgaagtttcaaaaggccaagccaggcccagtggcttctgcctgtggatccagatgtaaaacttgtagcgatatccaatgcaagctccaatgaaatgctttctttgataagagttgccatggtcatggtgtattacacagtaataagataacagtgtcaaatgtccatctgattccacagtcacagctgaaggccaggcccttcaagaggcaggctgtgggatgggttacctgcctcagataattttcctgtgtttggctaaggaattttagcgccataatccaaagatggctataaactttctctacactaattatttacagactgttgacagatatttgaacctggggtcaaagttctataaagacct

SEQ ID NO: 50530 - DNA, 355 bp, Mus musculus
  source 1..355: mol_type = other DNA
agacaatgtcgacgtcactggctaggtacattatacaaaggatctgttaacaataagcttcttaaagaatactggctgtagagtctctgcctgagaagcaagccagtcttctcacaggctaggattccccaggatgtagccctgtgctcttaggagaccaggactgccactccggctctgccctcagagagcttgtgtgtcagctgctgtgccctgcagtccctcagagctaccagaagacactgagagtggacagcaccgacagtggtgtgcactgactctccacagcaacctgtcaagtacctgtggtgctgtttcaactcacagccagcagttccagctgggaccctgaaag

SEQ ID NO: 50531 - DNA, 292 bp, Mus musculus
  source 1..292: mol_type = other DNA
tattcctttttaaaattattattatcagtattattctgtatttgtgagagagacagagaagagctctcaggagtgactctgcttgccagcctgaggcttgtgaggcaagcacttgaatcaggtgagaatctgctggccccacccctcccagcatgtgatgatggtcctgcacatgtgcttttcaagaacacaccagagcccacaagcaatattgtgtggtaggtatttcactcattgttcacgtacgcagagccctttgtggctggatctcaagcagagtcctgtttgttct

SEQ ID NO: 50532 - DNA, 358 bp, Mus musculus
  source 1..358: mol_type = other DNA
cttttttaaattattattatcagtattattctgtatttgtgagagagacagagaagagctctcaggagtgactctgcttgccagcctgaggcttgtgaggcaagcacttgaatcaggtgagaatctgctggccccaccccgtcccagcatgtgatgatggtcctgcacatgtgcttttcaagaacacaccagagctgacaaaaccttgtgtctgtacactctgacatgccacaagcaatattgtgtaggaggtatttctacattgtcttcaatgtatatttatgcagagtgttttagaaatgggctttgcacagggacattgagcagagtcctgtttgttctctgggaagagggcaca

SEQ ID NO: 50533 - DNA, 550 bp, Mus musculus
  source 1..550: mol_type = other DNA
atattgtctcaatttcagtaaggcaatattagatgattaaaatcgtttttgttttttgtttttgttttgttttaccagaagagacaatcagctcttgaagtgctagggctgagtctgccagatttacatttctgtgttacaaagaatgacaggtcctttgaaattattagcatttgttaatcacactgtgcttctcgtcttacaaaaatagaactgcaaactggatttcctgctgggcgaaatgccaggtagccctttcctgtcacattaaacagcctattctgttccggcacggaacgcggtggctcggaccaagggcacgctgacgcgcaggtagcccggagctgcgtcctggagacgccgcccgccagcgaacagcgccaccggcttccgccctaagcgcccagggctccgccggcctctgcggcagggccgcggaaaccccgtaggagcagggcggccgaggagcgcggcgcgcggtcgcgctgctgcaattcgtgagtacaatttggaaggaaattccggttccggccgcgagcctataaaaaac

SEQ ID NO: 50534 - DNA, 354 bp, Mus musculus
  source 1..354: mol_type = other DNA
tgctgcccctccccgtacgggatatggcaagcggagccgtggcgcgcgggtaaccgggaccgacggccaggggacgatcaccctgtttggacctgcctgggcctttcggcgtcaatcacgccggcttgcgcagagttaggggcggagctcggcgcgcggagcactcgcgagagcttcgcttcccaagcgggagggcctggtcctagggcactgctcgcggccctttaaggcagagaacatggcattcatagtttcattattaacttacagagcaactggaatgaaattgttgtttgagcaaagagctattatcccttgtattaaaggtaaaactctattgccgtttactagcac

SEQ ID NO: 50535 - DNA, 526 bp, Mus musculus
  source 1..526: mol_type = other DNA
gcattaagtttaaggtgaattttaagcttgaaattagtaaattttgtgctatgcatgcataaaagctgttggcatatataatagtgcaattatgcctttaagcttagtcttagacctaggttttatagaataactaccatttttggcttttagatccaaaaggtaattttggctcttacctttgtaagtagtgaatcttgtccttcttatcaaaaggttatgagaacttggtgatgcagtatgactttcttattaacagctccaaaatggatcaaaatgttcgttttggacgtcagatctatgagattttccagaaattaaatacaagcattcaggtaaagtttatttcttctaggtacagttacaataaaactgaagtgttctattgtccattttcccgtctagcatttgctaaaaagattatacaaactaaacagataaagacaagcattttattttttaaaggttgtgttgctttctgccacaatgccatccaattcgaattaaacaattttatattaatgtt

SEQ ID NO: 50536 - DNA, 435 bp, Mus musculus
  source 1..435: mol_type = other DNA
gctaaaagattcatttggactagtaaatccttcacaggacaagctgtctgctgacagttggtatatactacaagatgaacaataagctgattttactgactgtaagagtgcaagtacgtgcagcacacgtattcagggtctgcagccctctgaactggagttccagttgtgagccaccagatgatgctcagtgtccccttccggcgaagggtcaagtgagcacgtcttggccctgacctccgggctgagccactggcttaatgaaagcctctcccagcgtgggcccgccctaggcccggtccttcgagcaaagctttctcaggtcgcccgaccgcgctctgcagtgtctgctgggccgaggtctggccgcggagtctacacaggatcacctccgcagcgcgtcactggcacccgcgcgccggaagtgacgttatt

SEQ ID NO: 50537 - DNA, 448 bp, Mus musculus
  source 1..448: mol_type = other DNA
ttggctgttagcccagagctaataatctgaggtttatctactcacagaaaatgagtttctaaaaaactagcttgaaacttacccagaaaaatcttagaacatggttctccaatgtcaaggtaagtgttctgtgacactgcttgatgtagggaccacagattttagaatttgagtggagcacaccttctattgcttaatttatgtatagggtattttggctgcatgcatatttgcacaccaaaagaagatcccatggatgggtactgaaaccctgaacaatcattttacttgaggataattttcattgcactcagaaactctggtagaggctggattaaaccaggttccctaaggagtcttaaggcagctgccaggagcaaggggcccactcattggctattggccttgactgggttggccaattccccatgtaccagactaatgagac

SEQ ID NO: 50538 - DNA, 412 bp, Mus musculus
  source 1..412: mol_type = other DNA
ttttcatatgaacgtcaggatcaatactctctatttttataaagaatgtcattattgtttgtagattgcattgaatattatgaccattttaacagtatcacttatgtttactaatgaacatgacagaactttcttttttttttttttttaattttatttattttattattatatgtaagtacactgtagctgtcttcagacacaccagagacagggcctctcactgactctgaagttcgtacatctgagctgccttcttgtagaaaggctcaatcaatcaatcttaaaaagagagaaaggccatgtccctactgttatcataaaaagactaagatatgattttctttgtatcagaggtaccgcttgaatacatatctagatatcagttttttgagatagaaagcgaataaac

SEQ ID NO: 50539 - DNA, 258 bp, Mus musculus
  source 1..258: mol_type = other DNA
agcttcttggccagaactgaatggctccagagcagctggacacagaaaacccagaccagcaattttctgcgttcttcccagctcagaggcagagtagtcaaatctcttctctaggatagaaaggatctcttacagaggaaagttttcctgccagttgttaaactctaaatactacagtctaagatgtatgtgtcctacataaaaatttgagttttcacagggacttgtttgatcaggatcaccctgtgcggaggcagc

SEQ ID NO: 50540 - DNA, 251 bp, Mus musculus
  source 1..251: mol_type = other DNA
acacagaaaacccagaccagcaattttctgcgttcttcccagctcagaggcagagtagtcaaatctcttctctaggatagaaaggatctcttacagaggaaagttttcctgccagttgttaaactctaaatactacagtctaagatgtatgtgtcctacataaaaatttgagttttcacagggacttgtttgatcaggatcaccctgtgcggaggcagcattccctgcattacgggagcctgctcgctagc

SEQ ID NO: 50541 - DNA, 320 bp, Mus musculus
  source 1..320: mol_type = other DNA
cgatacgtccccgtctagacgaggggcccccgttggccttgtgtggccagggccagtgactggtggattttgttaaaatgactcgagattccccaacaggggcagtcgccagtgcacttagaagggtaccctacagatcagatgagggcttgtaggtttcacctccaaacccgtgccaatggggtccccacctctccagcagtagtaggtggcctccaacgtgctgctctgttaccaaagtgggcaaacagacgctgcagtgtaggttcgggaggggaggccaaggcggtccctcccctggacccgcgacagacatcccc

SEQ ID NO: 50542 - DNA, 418 bp, Mus musculus
  source 1..418: mol_type = other DNA
gctcttctccctcggcccggcaagatccagagggccagcctgggttggggagccgccctggcactgcccgaccctaaaatcggactgcgcgccgtgcgagcgctcggtgggctcagcgaccgcagccgccttcccgattgcagccctagctgcgggagtaggagccgccgccccgggctggggatgtctgtcgcgggtccaggggagggaccgccttggcctcccctcccgaacctacactgcagcgtctgtttgcccactttggtaacagagcagcacgttggaggccacctactactgctggagaggtggggaccccattggcacgggtttggaggtgaaacctacaagccctcatctgatctgtagggtacccttctaagtgcactggcgactgcccctgttggggaatctcgag

SEQ ID NO: 50543 - DNA, 295 bp, Mus musculus
  source 1..295: mol_type = other DNA
tgatgcaggtgagcgggcccacccacctcacacgcccttttaggaagagggctctcttattactcagctcagcatagtgtacgtttctctatggggcctgaggcactgacagcacacatcccaactgggtaaattagatctctgcatgcttgcagttagacagtatgtccacgaacaggctgaggctttgctggggtcctaaagtagaacaaagggaggctgaagagaaattactctctctctctctctccacacacacacacaagtccctccctaggaggtccctccgagtgta

SEQ ID NO: 50544 - DNA, 262 bp, Mus musculus
  source 1..262: mol_type = other DNA
tcccaatttgatatttccaatgctctgaatcaaagtgaataagaagagttattttattgttaaagatgtaaacagtctacaggttcactgaacagctactacctttgtggaactcaatacgttattgtgacctgatatacatccagttacaagcactttgtgtacttgacacgctcatcatcaactctgcaatatgatttatgagatctcagatgatgtgtgctactttgagacaaaggagggagctgggtcctgcttcctc

SEQ ID NO: 50545 - DNA, 309 bp, Mus musculus
  source 1..309: mol_type = other DNA
ggctggtcggagcgccccccccccacatatgtaggagagggctaccatgtctgatttcagtgggagaggatatatctaatccgggatgtaataaaataaataaattaattaattaaaaaaaaatgggaagatgttaatatatttgcatccaaagttgaattatttgctgcaaacacaaaaaaaatacaagtttttcagtgtctcaaagaaaatactcatatttattttgttgtgctgttttaacaccaggaacatggtgcgttgtttacagtaaaaattataagaaattgaaccgggaaactgaaactg

SEQ ID NO: 50546 - DNA, 243 bp, Mus musculus
  source 1..243: mol_type = other DNA
agtagaagacagttggctacacattaatgtgttgtacagagaaatgatctgccagtcccttaagttttcttttgttaaaatataaagataggctttcatcccttttttcctacaaggctttaagagatggagggagaattctgagattgtttcctagacagatcgtaatctgggtacaaccaaggactgagtgatctctgcaggctttctttttcttttttttaaaaaaataaaccactttag

SEQ ID NO: 50547 - DNA, 439 bp, Mus musculus
  source 1..439: mol_type = other DNA
aaatatttttgctacagcgaagacgccgacgtcacggagcccacgtgacggcggcggagcgggcggttccatcggtggcccggggcagggagggtcgccttgtagccgcgcgcgcccgcctcgggacccccggtgttccgggcggcggtgctgcgggaaccacgatccgcactatagggcggcgagcggcgcggccccgaggcattctgccggccgggagggcgctgcggagcgcgccgctgccaccgagtcctcccctgctgcggagcaatcagctcaaattccgagaattgagctctgttgattcttagaactgattgctgttgctgccgccgccgctgccgctgccgccgccgccgctgttgccgctggtgccgctgccgccgccgctgctcactatgtgtatctattgatataaatgtatctatttattgattct

SEQ ID NO: 50548 - DNA, 345 bp, Mus musculus
  source 1..345: mol_type = other DNA
aaaatgtaagcttctgtcaatggtattaggttgaaatattaactgcttggcaaatatttttctcttgctacagcgaagacgccgacgtcacggagcccacgtgacggcggcggagcgggcggttccatcggtggcccggggcagggagggtcgccttgtagccgcgcgcgcccgcctcgggacccccggtgttccgggcggcggtgctgcgggaaccacgatccgcactatagggcggcgagcggcgcggccccgaggcattctgccggccgggagggcgctgcggagcgcgccgctgccaccgagtcctcccctgctgcggagcaatcagctcaaattccgaga

SEQ ID NO: 50549 - DNA, 561 bp, Mus musculus
  source 1..561: mol_type = other DNA
gaacaggcttgtctttattcaaaccagttcacccagttcgtgtattttctttttttaagctgtaagaacagagcaattcttgtctttgaacaaaggacagccattgtttctcaaggcttgtcaaccacacttcaggaactggggttagtcacttcagtgggtcaagtcatctgcctagctctaacttgggtctaagctcacagttagaggccgggttggctcctctccacggggcaggactgggtcaggtcccagcttcggagctctcctgtccggacttctgagtcctgctggagtcctgggcggggctccgacgaggcagctttccaatctgtcgtctgcagaacagacccgcttcctccagtggaggcagggaagtgcattgcccagggtcacccacctcgagccgccgctgccccccgcgccccctccccgtccggctagtgcggcggcccgcgggcacacgcctccccataccttactggaaatgcgtgcaggcaaagtcaggaattcaggcccctgacgtcagcctccagcgctcagggcaccgcacgggagacc

SEQ ID NO: 50550 - DNA, 588 bp, Mus musculus
  source 1..588: mol_type = other DNA
cgaaaggcctgccttttttacttaagaaggcccctctgggatttcgggggccatctcccagggcaaagtttggcctctgtaacctacagtgcttaaaagcagtggagactccacaaccgcttacaaaaagataaattaattaataaattttttaaaaaattttaaaaaggcagcaggggagcagaggtccggagccaccgatctagggatgacttccaggaaagcctgcctccgagtcactgggtcccctcgaagccaccgggcgcggccccgccccctgggcacccagaaaggcccgggccgggggcgcgctggggactcccgcatccgcccctcccccacggcgtgcacccccgcttcccggccggggacccgcacttccgcggcgggcggggcggagcagggcgccccgcgctccccaccaccctcagcggcccgtcccccggggggtcggggggtcgagcggcgcccgcgggccgaggctgcgggaggaagccttcgcgtggaccgggcagcggcggccgcgacggctggaggcggaggctcgggcggaggaggaggtgccgggcactccccctcccattgtcc

SEQ ID NO: 50551 - DNA, 639 bp, Mus musculus
  source 1..639: mol_type = other DNA
tctcaaggcttgtcaaccacacttcaggaactggggttagtcacttcagtgggtcaagtcatctgcctagctctaacttgggtctaagctcacagttagaggccgggttggctcctctccacggggcaggactgggtcaggtcccagcttcggagctctcctgtccggacttctgagtcctgctggagtcctgggcggggctccgacgaggcagctttccaatctgtcgtctgcagaacagacccgcttcctccagtggaggcagggaagtgcattgcccagggtcacccacctcgagccgccgctgccccccgcgccccctccccgtccggctagtgcggcggcccgcgggcacacgcctccccataccttactggaaatgcgtgcaggcaaagtcaggaattcaggcccctgacgtcagcctccagcgctcagggcaccgcacgggagacccaccaaccagcagccactcccggcctgctgctggctcccggggcccgctcgagctttcccgggatagagccggccgctgcaaggtaagggccggcagcggggccgggcaccggggaggacgcgggccgggcggagcgggccgctgcgggccgcgggccgggccgggacaatgggagggggagtgcc

SEQ ID NO: 50552 - DNA, 316 bp, Mus musculus
  source 1..316: mol_type = other DNA
aagtcattgacaatgagtggtgcaatgaaaactatttctgcttattggcaattgtatttcaccttttaaaaactatagatagtaattgtctctcagatgagtagctatcaaagattttcttctattctacagatattggacagtcccagtcttaatgtagactttaaactttgaaaccaccgaggctgtttctgggaacaggactgtacacacatacacacacacacaaaggtgtgtgtgtgtgtatacacgtgtgcatgtgttttaggagtaatagtccacatctgcaggatttgaattcttgtttcctgaaacc

SEQ ID NO: 50553 - DNA, 440 bp, Mus musculus
  source 1..440: mol_type = other DNA
attaaaacaattggtgacctatattttccacatataggccctactaagtttcagaaatcttgtagctatacatatttgcggtattactactattttacctatggaaggacttgatataaattagtcctttgcaggaagcagaactatagttattcttgcatagtactaagcataattggattaaactatagggagataatttaataactaaggcttttgtttattttttacttctgtaaatcaaatgagcttttaagacttgatcaatacattaaattaacaaggatttattgacttgtaatggcatttacactaacaatgttctgtgccatgataaagcaagtgccgagggacagttgcagttcctttgttgagaagtctcttctaaaagatatatctgtaggcctacagtagctgactgtgcccactatgaggtcaca

SEQ ID NO: 50554 - DNA, 383 bp, Mus musculus
  source 1..383: mol_type = other DNA
gacaaatgttactatttctcttgaaagagtggacataaaataaacataacatggctttattagtctgatgaatgtgacagaaaatttatgatggaaattgaaaatctgtcctatgcacataccacattgttctctgtattaaatgagaaatcaagactcatcaaatagatatcaccattcattcaatgtgtagtactttgtggccattgacgtcactatctatagaaacttttgtgtgcatatgtgctcattttcagaatatttcttacatagatgttacagggcggattatatggtaattaatattaatcctggtcttcaaagtccgctttgattttaactattcagagcaaccttggtcaaatttcagtcagagaggaatg

SEQ ID NO: 50555 - DNA, 505 bp, Mus musculus
  source 1..505: mol_type = other DNA
aaagagaatgaagttttaaatagcttctccctggctggaacaacaaataaaacatctttatgaacacattttgaagcagaatttcttacaggaaaatgtcagatttctcttcataatttagcttctgaatcatatttcattcaatttctaaaaaggaaacaaattcattatcatggagactttgcctgataatatataattctttacaatataaagaatgtcagattttatagtaaagtgataagagtttgaaataaactttatttttcccaaataattctaaattaggaaacattgtaaaagaatattaactcctatttttatatcacataaaaatcctattacttatatctgtatggttaaaaaaaatcactgcaggctattttcttttatttgggacagaaactatttctaaatacatatacatgatctctcttctctctctctctctctcgttgaaatgaagagtgagttctaggttaaatataatcaaggaatttccctg

SEQ ID NO: 50556 - DNA, 429 bp, Mus musculus
  source 1..429: mol_type = other DNA
cagagtgtgttagaaattacgtcagaatttgggcacattccaaaaaaccgaaaagagtttataagaatattcttatgtgtttatgcaaatccatgctattatgttcaaagatagcctttttagtcatttagatagaaacatgacaatcaattttattatacatgtataataaataacttctctgaagccttaagttctgaaacaatctgcttatttaggagttttatattgagaaaatacacatgtaattttccctaatctctaacttcataaactttcacagaacttctctttctcaacatgaaagtgtagtagacagagtgcactttcttatgaaagagacagggaaagttttacctgtctgtcttcttcttttaaagattggtgataaggaattctaactacttaatgaggaggcctcactccatt

SEQ ID NO: 50557 - DNA, 230 bp, Mus musculus
  source 1..230: mol_type = other DNA
gctacacagggaaaccctgtctctgagagctctccaggggattttacaatatcccttcctagaaggaaacatgccatttgaaaagccatgttacatgttacatcatgtatatagacatgtatgtttcttccaaggaccaagcagaattctttgtttttgtttctgcctttgcctttagaaagagaagaccagtgctttcttcaggcccaaattcttgatgtttgactgga

SEQ ID NO: 50558 - DNA, 253 bp, Mus musculus
  source 1..253: mol_type = other DNA
gaattgcaggctggactccagagtctaaccactcccccctttttctgggagtgtggagccaagggattgttaaactgactctgccctacaggaggggaatagagcttttcaggcagtctgaaatgccccttcatgttgcatgacctcacttgtccccaggggtcggcctctcaggactgtgctagctctcaggcagctggagcgcggctcgcggaggctcggcggcaggagggaggcgtccctttaagagcgg

SEQ ID NO: 50559 - DNA, 394 bp, Mus musculus
  source 1..394: mol_type = other DNA
taggatgcatccaagtgtctctctttctcctggaagagaatgtctgataagtctttgctggtcaggcatctcagataaggagttactatgctaagcaaattgctttagtgcatgcatgcactgcattttcaaaaggaaaagacaatatatatatatatgcagtggaaagagactttcctgaataaaatactgggaatatactaaaaaatgaaaataggtttcaacttttattattagttaattacggagtgaaatggatgcctgattctcttcagatggtccccaggtagcccacggggcatcatcatccaccacggagctggcctgcgaggacctttgtggggattcggccacgaaaccaccagggggcgctggagctgctttaaatcacagc

SEQ ID NO: 50560 - DNA, 445 bp, Mus musculus
  source 1..445: mol_type = other DNA
tgtctgtactgacttataactgagttttggtgacccccaatccataaaattattttcattggtgcttcataactgtacttttgctgctgttatgaatctaaatgtaaatatctttggggaaataccttcaagaaaccatggatcatgatttccagactaggagcctctaagtgatggatcaaatcatttagtatgacttcatgattatggtaagtaataccttgcattaagaaagaaaattctgaaatatttcaattttgtattcattgtacattctaagaagtaaagcacataggttcttgaagcttcatttaactgacaagttaataaaaataaagcaataattcacatatgcacacttgccaagtgttctgcccaacactttggaatgtgaacttgcttgagcactattaaaatagtcaggagaacagctccttatcccaag

SEQ ID NO: 50561 - DNA, 496 bp, Mus musculus
  source 1..496: mol_type = other DNA
gaaactgatagtgaaactttccccttccttttgacaatctatgtcacattctgtacacataaaagcatatgcagcatattttacacatctgccttcctttatatatacatatatatataatagtaacaagctatataggctgacttctatcatttgttacttgtatttaaaaatagcactaagagcagacctcatatttagaaattcatggaaataatcataatatgcatgcatgacacttcaaattatgcaccatttacagatttaagcaatatataaagatgtagatacattctagaagatattttccagtaattaacttctagtatttttagttatctatgaaaggacatatttacatatctacccgttcccactctatttttaaattttaaatttgctaatctgataattaatgtatacagtacaaggtgttatataaacaataagctggctttgcaggtcagcatttaaaagccttaacaaacagtccctg

SEQ ID NO: 50562 - DNA, 436 bp, Mus musculus
  source 1..436: mol_type = other DNA
gaagggccttgttctcgagatcctgagaatgacggaatagaaaattattttcttctgtaatcgattattccattcaatcaccaatgctatactagtggctgattatgatagtggacgatactgataatgtcctactggcagagcaagatagggctcctgctgttgctctaggaactcgacactggccattagtatgtgaccacttgggatcttcagtggagcacaacggtgcgcaggtgtgcgccccagccccagtggcccacgcggtggcacccagcgcagcctggcatccgccagcgggcggaccccacgcggctcctcctcgcggcgggcgggactgccccgcgtgcggccccaaccctagccttgggaagcccggatcgcgggcggagcgcgattcaccgcggagtctgtgactggatcccagggccaatcg

SEQ ID NO: 50563 - DNA, 346 bp, Mus musculus
  source 1..346: mol_type = other DNA
cagggcaccttgaacattatcattgtcaaatttcacaggtgcattggtcttagagaaagcaactatggcatagatctctacagatggatgaatctcttgagctcaaacagattgaatgaacccatgttcttgaaatcaaaatctccagccctgggtggtaggcttggctcagccacacagggaaagcttgcccaatttcccctttcagtccccagtagaattccagaggtcttttaagatgaatcctggatgagcagctgggttacaggtttgagagagctgtgaggatgccctgcaggctgcttgcaagtctccaccttcactgtctcacacagagtgatacaat

SEQ ID NO: 50564 - DNA, 313 bp, Mus musculus
  source 1..313: mol_type = other DNA
tagcttttcttaatacaagcaacattataaaggttaagcatattatatttatatatttaataaatttatacacacatgcatatatatacatgtacacatatgcatatactaatacacaaatatacacacgaagtaatgatattacaatgaagtaatgatattacaatctctgtggtagttttaatgaaaatagcccccatgggctcatatattagtttgatgctttcaaaagcctaatttagaacataaataattctggaaatcaatacagtagtagttattttttaaccagctattacccaaataaaagaca

SEQ ID NO: 50565 - DNA, 677 bp, Mus musculus
  source 1..677: mol_type = other DNA
ataaataagctatagctgtctgacttattttactcagcattatgatatccaagactaccagtgtactgacttgaacagtaatagacagggttgtacaggtgtctcaggcaggcttagagacttctggggatattcccaggcttgcaggagctggatcccattcatctactgctttctagcctttaaatgcttctctgtcatcaatacttatcatagagataaaataatgctatgaagtattgacagacattatttttcctaatcgtaatttctcattttatataattgtgatgtgcatcagcctgactaaaaagcactttagattcttaaatataaatattaattcattgtttgaacaaattttattgagtacttgtgtgcaggcaattgtccacggtacgtgtcttggaaaatgtacactctagattttacacacttttgcaagaactgtgttctttcagtaaataaaaaaataaataaataaaatcaagcgccgctattaagttaccatcacttgttatcctgtgaccgtagggtcccttggaggcttctttagctctgcgcagagaccaagcctccgggggctggctggccgccctgcccggccccgccctgccggctgctgggcgcgtggcacagagggagcagggcagccaagtccccatcgccggctgcca

SEQ ID NO: 50566 - DNA, 387 bp, Mus musculus
  source 1..387: mol_type = other DNA
atgatctaataacatagaaggtacctataaggtcagtcatttttaactaatgtacatatgtagaaaacagatttccagaaaattttcagatggaacagggaatattttggttgaatgctggtttcctaatataaccatgacagttaaggagtacctgtctgattcagggacacagcacagtgctctgataatctggtgtaattttaaatcttgctgtgactttttaaaacttgttagtgactttcacaaatctttgtgcatttagtctctcaaatacatttttactctggtagagatgctgctgctgcagctgagcacgagctaagtgtgtacttaagttttccagagttgagctactatcgctacttgttccgctgaaaatctgtg

SEQ ID NO: 50567 - DNA, 544 bp, Mus musculus
  source 1..544: mol_type = other DNA
ctagtgtatacatatatatgttatatatattatgctagtgtatacatatacatgctatacatatatgtatacactagcataatatatatgtatgtatgtatgtatgtatgtatgtatgtgtcactcactggcttcgttcagtgagccaaggcccatgtcacttgctgaatcattaggtagtagtcaggctagaatgacaataaaaatcttatatttccacatgtaaaatattaagcctggtaaaggctttgccctcgatcacagtggagaaaaggttagaaaatagatcagttaatatatcctctatttttaattgattgtattcaatttttaatttatttctattgaaaattatgttaaatgtttccaatctagatattagagaaaattaaaaatttccacatcctactttccgatgtttgggtcaactatcgctaagttaggtgattatcataaagttccaaactaaaaaacaactttaacgatctaaagagttttttcaccactagtcttcaaatacatattttaagaatcttagttcaaa

SEQ ID NO: 50568 - DNA, 529 bp, Mus musculus
  source 1..529: mol_type = other DNA
agctcaccagccagctggcatgggtagttcagacttattcatgaccacatagtaaaataaaattgtgtttaccccatttgaatcttaattaaatcagaattcaggatgtaatgaaatactctgacttaaaataaaaccatctcaattaagggccatttgccagctttcaattaattaaattgagccttgatttaagaaaatgctgcttgtagcagaaagagcccatttctttagtgaagcaaagcatttaaacacctgagcttttccaactttcagagtggtgctcctgttactattaacaatataatcacttgactctaaatcggacgaataatttcaggacgagtaatcctatataaataaaaataaacaagagtttatgattggccaacgtacacattctatttcagatacaagatgtattgatctgcccagacagtgaatcatgttgacaggatgcattacattttataaatgtctttccttatttagaagactcataattgaaggccactcaccttttaaaggc

SEQ ID NO: 50569 - DNA, 513 bp, Mus musculus
  source 1..513: mol_type = other DNA
tgagagtggccgcccactcataccctttatgtaccacccattctttgataaatatgcatgctggaatgtttcctttaggggaagagacagttcctaaaccagaatttaattcagtgtcttgtattctggtttctttaaaaacaaaaaaacaaaacaaaaacacacacacacacacacacacacacatgtatgtatgtatgtatgtatgtatgtatgtatgtatgtatgtttgtaagtatgtatgtatatgcccactaatcccagatataaggatttgtggtgcctggcaccactttacacaagtcttaaatctcagagtggagcgcagataggctctgtcccggcggcgcctagctggcaggtgcagccttggggtcccggccttcaggccgcagagctgtggcctgggctgggcgcggcaggcacataggcgaggggaggcggtctggctcgcacgcctctgcgtgcggtgcagccttgcagcccccgccccccgccgccgccgccgccgcc

SEQ ID NO: 50570 - DNA, 418 bp, Mus musculus
  source 1..418: mol_type = other DNA
attcgtttttatactctagaaaaatataactgttttgaggagcaaaatatcttcttagggaaatcttggcaattaaaaactagcaaatatgtaacattttcccaattaaacattttatgtataagcaaaatacagctttacagtctgaaacaaaaatgtttaccttgccattaaaaaaaattaaaaaataaaaataaaaaagggggtggaaccacatttctccatttcgaaatatattgttatatctataaggtgggtgataaacagcgcctctgaacacctcgggccaggcgctttgaagaacctgccttgctcttagagggaatcggatgggattgatgcgccgttccagtccaatccatggaaaatgacgccctgcgcatgcgtgccagcgcccatgcaaatctgctgtacatcc

SEQ ID NO: 50571 - DNA, 230 bp, Mus musculus
  source 1..230: mol_type = other DNA
ctagggaatggaggatccccatttgcccgtagctagtcagtgtacttctttgacctgaatacatcttccactcttcgttgagtcaaagagggagaagttgggaaaaaaatttgtcccactatccctaaacattcagagggactccccaagcaggctgccgggtctgggccgagctccaaagaccgggaccccaggatgcagtctggcaggcgcgcgccaggaacccgcgg

SEQ ID NO: 50572 - DNA, 521 bp, Mus musculus
  source 1..521: mol_type = other DNA
ttacccaggcaaactaattaccaagggcaacagaaggtacattttatatttttccactcagagtaggaagactcctttctccttggatgcgcttggcaagccctgcccctaaagagggggtacggactggcaagtgatccgggcgcgcgatccctttaaatgggaatgctgctgctgctggctccgtaacaccggagccggcagcttgttgatttcagcgctggtgaatttcagcccccggggaggctcgagtccactcccggacgccgccaccgatcccggcaggactcgaggagggcaggggcccgcagcggcgcagcgggcgggggcgggaggaccgggggccggggccacacgcgcacctcgccgcagtcgggctcctcccgcgaaggagcgcggccgccccgagcgcagcgcggcgcggggcccgtccagaagccagcccgcccacgggccgggctgcccagccgcgccgggaggccggggcggggtggggggcgggggtgggtgccgcggccgcc

SEQ ID NO: 50573 - DNA, 434 bp, Mus musculus
  source 1..434: mol_type = other DNA
gaataacaattgtgactttgtcattttatctttctatgataaaactaatttttgcacaacttgtgtgtaaattaaaaaaaaacccagaaaacctgggtttgattaaatggtgctgagggcaccgggcaccgggcaccgggcaccgggcactgggcaccgggcacacacatctatatacataaaataaaaaaatcaaacaaatgtccccttccccaattttttttttttggtaagtgtttattcacgaacatttgagctaaactatggctttagtatacgttttttcaagaatagcaacctaattctatgcacacattaagtagaatactttgtgtgtggaaagattataaatatctgtcgaggtggattatgaataatctgtatcatttgtaaacaaaacgaatgtgtcccagcttctgggaataaaccaacac

SEQ ID NO: 50574 - DNA, 290 bp, Mus musculus
  source 1..290: mol_type = other DNA
tcctcccatggacaggaggacaaggtttcccttcagtgaaaccacaaagaaaatggcaaaatgtttgtgtgtgtctggagtatgtatgtgtgtaactactaattcaccaattaacgggaattcaggttatatccctaatacaactgtagagattgcaatgaaggtgattacctgcctgacatagtagagtggggattagagctccattcaacccctcccagacaaacaggactttattgtcttgtgattccacttcttggcagggactaccatgggcagcatgtgaaatt

SEQ ID NO: 50575 - DNA, 388 bp, Mus musculus
  source 1..388: mol_type = other DNA
gtattgctttgtatatttttagattttcaaaagttctcaaaattaaatacacgtctatggaaagaccaaggcttggtttctgtttctatagatcctatttaatctctttacataaggggcactttagctttcactttttactttttcaaaataagagctaggaagagaagcttcctcaagctcgtaatgaaggtcagaactgaatcctgagcccagatcaattcctctagaagcagagggctattaaatcctagtgttgctaaatgttttacaaacactaattaattcaattatacagtactgtgtaccaagtgcagatgattaataatgcatgccgaggacatgtgaccttgaacagttcttggtgccgccctgcctcacagaggcg

SEQ ID NO: 50576 - DNA, 356 bp, Mus musculus
  source 1..356: mol_type = other DNA
gaagtgaaataaagtacaagactatctgattttttccaataacaccattacctgttctctttaaaaaaatacaaaaatttggattgatacaaataatttagattattaataactggaacttttgaatattaaataatagttgggaagactttgacaagggccatttcaataaaatgggtgccattaaaattaacaaaacaaaaacatttgtgtcttaataaaactgtatgtgtttatcccaaacctaatcttctggctatatgattcagctacgaaaatgatctttaaaagatttccttaaataggtcccgcccagtggctccccgcgcatgcgcatgtcatccgcggcccgcgga

SEQ ID NO: 50577 - DNA, 315 bp, Mus musculus
  source 1..315: mol_type = other DNA
gcagttcctgtgagggaccaagcagggtctcccagctctggcttctttcaattaggcaaagcagtgttttagctcccacgtgcacatatatacatacagacaggcgtgcatatgcataatttaaaattaaaaataaagttaaaaacattttttaaggactgaaggataaaagatgttgaataatttatcggaagcctttgaacacactctcccggggcgggggatgaggcgggaaggcccccttccttccctatcctgagtcaactggacacggtcgagctagaagggaccccttcggctccagccggggtgttg

SEQ ID NO: 50578 - DNA, 401 bp, Mus musculus
  source 1..401: mol_type = other DNA
tttattttgagatctatataactatatgacctacatttgagtaagattaatatacaaatttattttatgtaaaaaatattcaaactttggaaaactttgttttccaacttttctggaaaaagcacttaagtggatttctttggtttttaagtatagtttttctaaatcaacgttttacatgtatgtccattgagttaacgaaacaaaacaatcttttttcttaaagagagtaaattggatttttaagaatcaggacaatggtagtgctaagagtgttcagactgcctgcagaagccaggagcttgccaggcctccagatccaaaagacctaatctcattttgatttaaagcagaataatttgtttacttacattaacatgtgtaaagcctgaccaagcgtc

SEQ ID NO: 50579 - DNA, 248 bp, Mus musculus
  source 1..248: mol_type = other DNA
ccaatagaaagcagaggctgatcataggcctgtggcaccacaccctactcactgcagagtggctgtcacatgcagaccccacccaggtcccgagcctgctaggtgaagaccctggatccctggaccccacggagtggagagccaggctcggaacaaggtgcactgcgctgtctccagtcttgcatggctgctgcatggctaggcattgagaggggaggctgcccccgcgttgagcagggctcttgcct

SEQ ID NO: 50580 - DNA, 251 bp, Mus musculus
  source 1..251: mol_type = other DNA
gctcccacatgcacctgagcttcaggtggtgcggttgccagcccccccaccgtacccccaaacccctgtgagggctctaaggtcccagagctgaccttcctggatggcataagggcaactcaggcttgcagaggggaggcagtggaagaagaactggtgggaccaacacagtcctttgtcctacccttgtggtagtgcccatcacggtcagcttctctccgctggcccagccaagagagaggagatgatga

SEQ ID NO: 50581 - DNA, 474 bp, Mus musculus
  source 1..474: mol_type = other DNA
caggcgcgccctcgccggccggctgatgtcaaactgcagctcggctggtggagctcttaaagggctcgcgcgcggggcgccgaggccgccttggccgcccgcggggtgaggaggggagagccccgactcccttgcccgccgtctatccgtattgccaactgggacggaggaacgagcgcgcccctcctgtcgcatttctgcccagtaggaaattattctgaaaccctggctgtgggtttagtatctccccaacctcaaattttgtcttggcctatatctgttcaaaatatttttcaaatgaacttattatacaaagtagttatattgcatgcagcaagaaagggttaaaatcctttccggtgccccgggctcaggcgcgcgccattggccgccagaccttgtgcctagcggccaatgggggcgtgtctcttcctcccattggctgaaagttactgtgggaaaatatatatagag

SEQ ID NO: 50582 - DNA, 320 bp, Mus musculus
  source 1..320: mol_type = other DNA
ttttatttgtactgaaagaacatgtgcatttctaaaggtgaacgatggttaatctgaacactcatatataatcaaagttactctcatttttattatatagaacatatatgagtgtatgtatgcatgcacacacaactccattgtacacatatacacaatatatatgccaaaacacaagagactggtaagttctaagttttgggtggcctcttagcccacacttatcacaaggaaatgactctcatctcagtgtagccaggagatggggtcccagatctgccaaacctacagtctccccatgaggggaggaacccttcctg

SEQ ID NO: 50583 - DNA, 540 bp, Mus musculus
  source 1..540: mol_type = other DNA
tgtgattcccaaactctaggaattgtaaatttgaagctagcatgagctacatatacatctcgagtttctcagaagctgaagaacaggtggcccttcactgtaaagaaagacatcaagtttgtcattatacagatctttgggctgagcctaagcctaaggaataggcataggattgaagtccaggtcagagacgtgaagagttcttacacacagtgtggcactgtggcaatacaaccacggtggtaggcagtttgacattaagttaaactgaacaacccttgagcaatgctattactgaacatgtttgacaatggctagattatttaagaaataaaatgttgagcaaaagagatggctcatcaggtaaagatacctcccaagaccatactcctgcacaggaatgagttagtgcaacagcctgctatttctgggaaaacttaggaaatttggactctgaaagtttgaaagctcttgtcattaaaacctagaatatgccctatggagattgaggatgcaagaatacttccctcttcctctctg

SEQ ID NO: 50584 - DNA, 342 bp, Mus musculus
  source 1..342: mol_type = other DNA
ggagctgcccggtgggtgcaggaacctttaaatgctttgttaagcagaggtctgacggcccccttctcctggtttcctactggggtagggatggtggagggaactatatttttcctaagaacttaaatgccttttccaaaatattggatgacacattcgagtgtgccttataatgttcttgcatattttctctaaaattggagttatttctatatacaaattttagaataactggtgcctaaggcaagagctgggtcccagttactcctattttcaagtgcagtcgatgaacgccccttcaactgccccgcaggccgacactgccccgtgcggtgactcacg

SEQ ID NO: 50585 - DNA, 526 bp, Mus musculus
  source 1..526: mol_type = other DNA
tggaggcagcaggtggcaggctcagcttcccgcgctcgacagggaagggaagtatttaatttgcttccagctctgtcggaagaaactcctctctgagacccggctgtcttccgtatggaaggtcccacgcccgtgggctgggccaggagtccagagctaggactttgctctccaccttgccagtgggggccccgtaggcgaggaggtgggcgggaccggagggtcgccccgccccctgacggcccctccgcgctgggcgctgggatgaggcaatcacgtgacctcacatccggcgcgggagtcctgagctcgcggggcgctccccgtgtgcccgccggccctccccgcagcgtgaccgggcgccgtggccgcggggagggggtccgcttcgtcgccgacggcgggagaccgcttcgcagcacagaccgtcctccgccctgcccggctgcacgccgccgccgccgccgccccgggcgccgacagcggagcgcggacgcccctgagcccggtgcggcccgggccccgc

SEQ ID NO: 50586 - DNA, 481 bp, Mus musculus
  source 1..481: mol_type = other DNA
tttcctctcttccattagatggaagattagattgaacccaggtcttcaggcttggcagcaagttggtggtccacccccgagtagccagggtttctctgtgtagccttggccgtcctgtagaccaggctgggccaggattaaaagtgtgcaccaccactcctggcttgacatcaaggtggatggctgttgcacagtcccagtacctgggaggcgagttggcggcccaccagggctacacagtgaactccaggttagcctggaccacgtgtaagcaaacttactgaaatcgaagacaatttgaaaatattctaatggtttcctttagcgaaaaaccatccatgtataattgtgcggcaaaggcgtgcgaaggaggaagcagaggcgatgtgtaccccatccgagcgctggtccgcgccagctgggtgctggcggggccctcctttgtgcagcggccgcgcgcggctctaccgctagggggcag

SEQ ID NO: 50587 - DNA, 382 bp, Mus musculus
  source 1..382: mol_type = other DNA
ttcaacacagtcgattataaactgatttcttagaaaggcttaaattgactttttatatatacacattacgaggatcactattttcgctttaactttaattataaaaaatgttgatacaatgctcactggaacatgtgaacttttttttttctgctccagaaagcagaagcgcaacgccgccggctttcactttctagttctgaagctttttaaaatcgatttaattgcagtcccctcctcttcctgacggaagccgcggggaaactttaaacagtggagtacaagtctggaatgtaccattctcttaaccgagaaaaaaattttacatttcttctctataatattgtcaaactttaccaaaatcttcacagccggagaaacc

SEQ ID NO: 50588 - DNA, 268 bp, Mus musculus
  source 1..268: mol_type = other DNA
aagagtatgaaaagtatcatctgagtttttactaagttacttagaaacttcatatgtctcgaaaaagtgccttacccattcactactgtgttcaatattgttcatggcaggagaagagtaacaggcaaaaaattgattctcttatagttgaccaggctggtctcgctttattttccttaatagatgattattaaagaataatagtaaacagaattctcttgaatttcgatctagacgtatctatagctggcgtcgcagccctaaaggg

SEQ ID NO: 50589 - DNA, 417 bp, Mus musculus
  source 1..417: mol_type = other DNA
aaaatacaactcagaacttgaattactcactgaatttgagttgtgtcttggaaatcacatcttttgacctgttgtgaatatctgcatatcatggagtcgtgtggatcagatgattttacggggtttgaacccaccaggcctgtttcaaaggctggatgcttttcagaagtgaaaccagtttccatcaaaacttgttaaatcaccaagtcttagaaacttccttgatttaaatgtcactctagcacgtgttgacagaaaagttggctcttttgagttcaacctttattttcacactgagcgtagctggccaacgcagtccaggctgtcagccttctcaagcttggcagcggcggctgcgaagcctgctcttgattggctccgggcagcgcggccccgccccctccatggccgccgccg

SEQ ID NO: 50590 - DNA, 514 bp, Mus musculus
  source 1..514: mol_type = other DNA
atgtctatcatagaaaaaagtttctaaggaaagaagaagcatatataatgtttgtgtattctctgaaaagttaccaaaaatagcatgtggtaactcttgtagactttagatagcaaatgtgtagacgataaccctagaagtttacctctaggttttctctttcaaaggtgattttaatataatttagctattgcactttcagaaaatggtctctgattatatcaaaacaatttccaaattattaagcggtggaaccaataagcaataggttacccgagggaggagtgaggcaggccacctgacttccttccttctcagggcgtctgcgcggtcggcctcctagcaacccacgcctgtgcaccgcggttggctgtcgcagtggccgtgcacctcccgcgggcggtgctgccggaagcccctcccggggccgcggctcggtggctggtggctgcggctgtcactccggggcgttttccccggccggcgctcagctggggcggaggaagaggcggcc

SEQ ID NO: 50591 - DNA, 377 bp, Mus musculus
  source 1..377: mol_type = other DNA
agtaaagaggttatattattcaaatgcagactttttatgatatcataaaaatgactagtctgtggtttcataacagacctttgaaaaccatcccaatactgatattctatgattttatactggcttggtctgcatagaaagaccttgtctcaaatattaaatagaaatgtgaattaaatgactaattgttcagtcagctaacatctcttatctttgtggagtgagtcacccgtgagcctcagttttctgtcataagacagcaagctaggactgagcccgcctaacacgaggggcggggcaagaaggtcggctttgtcctcgccccgccccgccctagatatcgcgagagggagggccgggcttggcttcggcatccg

SEQ ID NO: 50592 - DNA, 384 bp, Mus musculus
  source 1..384: mol_type = other DNA
tgtggcagcctccatagctctgaggcagcctccaaagctccatctacgggcatccctgaggctgaagctctgaggatgagttctattgtctacccattgggtttccaagtcgagaactgctatgtccctttctagtgaagaccacaacgtctgtcttctattctgatcctcacattcctggccaggactcggggaaatgaaactgttggtttttcatttacacaaaaatgaaaaaaaataaataccaataaaagatgttttgaacaaaaatgcaacttcgtcattgtttcttcctcagggagcagctgtaggatcccatctttgtgccccacacagagctcagctttgaggccagtttcccccaagctgtggtgggtgtggcat

SEQ ID NO: 50593 - DNA, 326 bp, Mus musculus
  source 1..326: mol_type = other DNA
aggacccagtgggtttgtccagtgctgaaaattattataaaattgtagctgatctgtggcagcctccatagctctgaggcagcctccaaagctccatctacgggcatccctgaggctgaagctctgaggatgagttctattgtctacccattgggtttccaagtcgagaactgctatgtccctttctagtgaagaccacaacgtctgtcttctattctgatcctcacattcctggccaggactcggggaaatgaaactgttggtttttcatttacacaaaaatgaaaaaaaataaataccaataaaagatgttttgaacaaaaatg

SEQ ID NO: 50594 - DNA, 307 bp, Mus musculus
  source 1..307: mol_type = other DNA
aaagtcatgtgacagtgtacagtctagatctggattacagcgacggggctggccagcctgattctcataatggaaacaggggctgcccctcaaaaaatttaagtgtcggttccttaaatgacattcgaaaagtggaagaagtctcgtcctctacgcgggggggtggggggctgaaaccttctcgcaccttttgcctcccctcaggatctgtaccaggcttggatcgggctaaggaggctgcgcctgagcactccccgcctccgcgctgtctgccgtcgggccccgcccggcgcagccctaacgcacg

SEQ ID NO: 50595 - DNA, 341 bp, Mus musculus
  source 1..341: mol_type = other DNA
ggggacacattcatgaacgcacaaatgaatgcaggcatgaatgaatgaaatattaacgactgaacttttcacttgtttaaacgtcgtactaggagttaatttttttttttttttgtttttctggacaaacgaataatttaaaaaccagcaaatgcgcagcagttcagaaccgcaggccaccggaggtgggctagggcaacgtgcaggcttgctgtcccaaagccacttcgagagccgcttccaccggagctcctctccgcaaggcgcttccctgtggatttctccaaccccggtagcagcgcccggagcccggggctcggagcgagccgcctcctcgtggg

SEQ ID NO: 50596 - DNA, 369 bp, Mus musculus
  source 1..369: mol_type = other DNA
gcatagaatattagatttgcaagtatctgtgagcacaaggaccgaatccacctggtggaaggggaggaccgactcccacaagttgtataaataaaattatgaaaaatatttaaagatggccaggcctcaccataccactgcagctgctcagcaatgccctggggagcagcctcatcccgggccatggtcacggttgttgactagttataaaacttcattgcccagtctctgagaaggtctgcaaaatcatggatccatcctcgagtcgattgtgcacagtagaatgtgacattggagtcctctcagcaacccttggaccggccggcagggggcagggcgtggactctccccgggctgcgcttaaatagt

SEQ ID NO: 50597 - DNA, 449 bp, Mus musculus
  source 1..449: mol_type = other DNA
tttttttttttttttgtttttctggacaaacgaataatttaaaaaccagcaaatgcgcagcagttcagaaccgcaggccaccggaggtgggctagggcaacgtgcaggcttgctgtcccaaagccacttcgagagccgcttccaccggagctcctctccgcaaggcgcttccctgtggatttctccaaccccggtagcagcgcccggagcccggggctcggagcgagccgcctcctcgtgggcgcgcggcaggccagctccagggccgccatcttgcggcccggaggcgagcggacgagcaggggccgcgggccgcggcgagcgggcgagcggcggcggccgaggcggagagagcggcgcgggggtgcggccgccgaagggggagctcctcccccgtcccctcaccccctcagctgagctcggggcggggcggggtacgtggagcgggg

SEQ ID NO: 50598 - DNA, 411 bp, Mus musculus
  source 1..411: mol_type = other DNA
gacgcgtccctgcgtggtgggcaccgcgtcgcgtggctccgcttttcgcaccgccctactcgcctagagcatcggtgctagccccgccctgccatgcaggcggtgccaggactcctgctctccagccggctgttgggcaaatagcccgtcatgaaaggcgctgcccctgacagctgcctggagtgtcagcatcccggggcgtggctgcccttaggcgattgccgcccctgactcagtagctctgtgccatggagcacacccccggcccagcactcctgttagccagctttcgggagggtgtttggcataactgtgctagtacttgcgggtccctctggagtccccaccgcgaccactgcagactgcgggactgggggcgggggcacgcacgaaagtccccacggccgtgga

SEQ ID NO: 50599 - DNA, 623 bp, Mus musculus
  source 1..623: mol_type = other DNA
gaatgggattttaagtccgcgttaattcagactattaatcagcttatattctcctgcaccagtgcagatgcagcagcaggaattcagcttcagtcctgcttgcagacggcaggcttgctcctcgaggtctttacgtctgcaggactaccgggcacatgtccatttgacgaacagcgtagcctgaagggacgggtacgtgacctcggcccgggagggtccagtccgtgctggcccggacccttctgctgccctggacggtcccggacgccacggcggagttcctcggtgaaagtgtccttgaacctcacgacgcggcgacgcagggcaccgggcggctgatccgcgagggcgcgcaggcggcgggctgcatcgtggccgcgcagctgtagctgtagcagcgcgaaggctgtgagctgcgccgcccgccggatgggccgcgactcggacagccgctccaccagctgcgggttgtgcagcagggccgccagcagccgccggaagaccatggctctccccgcgccacggaacccgacgctcgctgccttcgccttccggacggccacgcccgacgacggactagccggcgctgtatgatgacgacacggctcgccccgtggttctgg

SEQ ID NO: 50600 - DNA, 362 bp, Mus musculus
  source 1..362: mol_type = other DNA
tcaagacagaactactctctagcctgtctttttagagtataaagtgagaatacaacctgacttaggttcaccgaggactttttctgggagtgcttattctagaaagatccctgaaactgtttcatagtgagaccctatctttaaacaaatagttctctggatggatgctgaaacatcctaccatgttccggtaggtcagaattagtggtcagtttcagtctttctgacagtaaaagcttgaggacagctgatgaccggaagtcggaaacctgctttgtggcgcctgggccgctcagggcgcctcgaggttaacgccctagtcacgctcttcgcacaaggcgtgggcggagcttctggggtgt

SEQ ID NO: 50601 - DNA, 450 bp, Mus musculus
  source 1..450: mol_type = other DNA
cagggtttctctgtatagccctggctttcctggcagtctggcctcgaactcagaaatctgcctgcctctgcctcccgagtttttaacctttacaaagactaggtaatacatgaattaacttaaaatacagaaaaataaaaaaatctttgttttgcaaagagggacctaatttagcagcataatctgattcaacttaatctggttaaatttgtagggtggcgtcgcattcctttaatcgaggccagcctggtcttcaaagtgagttccaggacagccagggctatcaaagtcagcctggactacagagtgagttccaggtgaatggatacaccctctacacacaaatatgtttggatcaccgcccctcgggtcatgacgccactttcagggcggggctgtcttacggccccgccccgcgcccccgccgccgccctcccccagggttgtggc

SEQ ID NO: 50602 - DNA, 441 bp, Mus musculus
  source 1..441: mol_type = other DNA
tgcctttgatctgagccaatgcccagacactattccagttcacctcactagagtgtgatgtcagtaaactttccagacactatatggtctacacttgtgaatagagtcgataataacgtaaggtcttcactaaagagttttccttttaatttaaggctgaaagcaactaggtcagctaacgcactgggaggaatgacattacatttacctaatgtatttttacctgaggtccgtgcacatctgaactcgacgcctgacgctgcaggaaacggcgatagccatagcctaggcagggggctcagcccgcacgcatccggttgtgggcaggaagcggggctgagcgcggggagtgcggtcctaaggcagctcgcccggtccaagggcccacctaggcgccccgaggacgcagcctctcgccccgccccggccgggatgacgagg

SEQ ID NO: 50603 - DNA, 221 bp, Mus musculus
  source 1..221: mol_type = other DNA
tctggaagttgacagtgaactttctacacagcattatcaaaacaacgctgttgaacacccccagtagacaaaaacctttctttttcttccatatcccagggcaaccccaaacctgctctttgggctgggatgactcttaatttttaagaagtacggatgacccttctaaatggcggactcgtcccttggcaggctgcacctgtagagtgacagcccgcggt

SEQ ID NO: 50604 - DNA, 481 bp, Mus musculus
  source 1..481: mol_type = other DNA
gcttagtgagcccaattaaaaaaaaaaaatcattggtttaccaaactggacactggtacaaaggttacctttctctcaggcaggatgggaaccataagcaccccaagatacttcgtggcttgccagtcccgccttggaaagacaaagcccggctctgaagcccgggatggacagggcctttgcttcctccggcctcgggtaccccaggcgccgcgggtgctccccacctccgcaccagcgctgaaaggggcgtcgctgaagtccgcggcgagcctgccgaccagccaggctgcccaaaggagcagccaggccacagcgccggcagccaggacgccggagcccgacgcccgaaaggggcgctcggggcaagctgcggtcaccgaaggaatctgagcacgctgagcgcgcgctcaccttcggagaggccagccccctggccccgcccctcgtcatcccggccggggcggggcgagaggctgcg

SEQ ID NO: 50605 - DNA, 401 bp, Mus musculus
  source 1..401: mol_type = other DNA
cttgaacttaagctacaactcaggttaagccttgagcacccatatgggtgctaggaacgaacctaggtcctctacaagagcagaaatctttttctaaatgctctttaaaatagcataactaaataatgctaggttcttttcctaaaaaaacccaacaacaacacgtttttcttaatctttttactactactttttactgaacacactatattttgtccaaaaagattgtgacacttagtattcaaatgacactttgagattacctacacttgtttatttaatctcaaatataataaaacctgcgtatttacgagggttgctcaggtttaggcgccgagcgatgagcgaggcgcctctgccgaacagtcacttccgggcagagaggcgcggcgggcgagctg

SEQ ID NO: 50606 - DNA, 651 bp, Mus musculus
  source 1..651: mol_type = other DNA
ccacctagtattttaaaaagtctctcttcacccccgtccgtgcgcagagcctcttctgctaggctgcgggcgcacaggctctcgtcgccgtggaggcagcggtaccagtgcttgcaaaccagggcgcagctccgcagcacccggctgggcaaccggccgccgaccccggaggaccccgagcccgcgctggcgccgccgccggcaccggcgccgccaccactagcgccgcccgaggctgccccagcccccgggcccggcgccgccatcgcctcaccagccggcccgagggccgccgccgccgccgcttcgccccgtctcggcgcgggaggccaagcctcgcctacagccgcgagcggctcgctcaccgcccctttcagcgccagccgctcgcgcctccaccgctcccgcccctgccccggggcgtccgctgcgcgccccgcctcactgagggcagatggcgcgagccgctcgggttcccgcccctcggagccgctcagcgcgggcgccggaaccgcccgcctcgcccggcctgcccgcgacgcgccccgggatccgccatgcgagttgagggcaagaagcaagggcgcacgcccagctcgcccgccgcgcctctctgcccggaagtgactgttcggcagaggcgcctcgctc

SEQ ID NO: 50607 - DNA, 421 bp, Mus musculus
  source 1..421: mol_type = other DNA
attccctgggccaaggatatgtgaaacagagtctcttactaaactcactgtatagaccaggctgtagttatgtagccaaggctagtttataataatccttttgtgactacttcccaaatgcgccaaatctctacattgctgttttatttacaaggattctttgaaaccaaaaatttgcaaataaatgctaagaaaaatctttaaggtaaatttgttgtaatttcttcttttagcactaagaactttagaaagctttgttaggagaaaaagaataattacaaaaattcctgttcggatcttggtttagagagttacttgagtaagcaagattctgcagcctacagtagccgctactagcaggctaggcgggaacgcagacgcagctcccggaagtcccgcccgactgagcggttccttgggg

SEQ ID NO: 50608 - DNA, 473 bp, Mus musculus
  source 1..473: mol_type = other DNA
tgaaacagagtctcttactaaactcactgtatagaccaggctgtagttatgtagccaaggctagtttataataatccttttgtgactacttcccaaatgcgccaaatctctacattgctgttttatttacaaggattctttgaaaccaaaaatttgcaaataaatgctaagaaaaatctttaaggtaaatttgttgtaatttcttcttttagcactaagaactttagaaagctttgttaggagaaaaagaataattacaaaaattcctgttcggatcttggtttagagagttacttgagtaagcaagattctgcagcctacagtagccgctactagcaggctaggcgggaacgcagacgcagctcccggaagtcccgcccgactgagcggttccttgggggggtacctgctccggccgcggccagtagaccggggtgcgagcggctgggtctcgggacccggggggtaccgcg

SEQ ID NO: 50609 - DNA, 370 bp, Mus musculus
  source 1..370: mol_type = other DNA
tttgtttttttaaagatttatttatttaaatgtaagtacactgtagctgtcttcagacattctagaaaagggcatcagacctcgagcagtcagtgctctcaactatttactgtatctgcatatatctttgtttaaggataaaaaacaatcatttactaaagtctactatagactggttcattttttactaagctattaacttacactttagaatttaagaaacgtcaacctactttatgtgaaaccctgagcgtttcatcaaggatatctccggaattcagggcttcaaaccggctcgcggagagttgagagggcggagcttcgggcctgccagtgcgcctgcgcacagcacgccgcggagtgggggagg

SEQ ID NO: 50610 - DNA, 312 bp, Mus musculus
  source 1..312: mol_type = other DNA
caggtttactttttataaatttttaaactgggtccctgctaagtatgaggaaggaagtttttatctggcttcttgaaataaagatacagaaattctcgggtattagttgtcattttacacacttaccaaaggcctgtcagccatccctgtgtgacacacagtgtttgtgcgactgtgatgcatcagtgactcactaagccatgtgtccttccttggaatcacatgaaagtcaggcttcgcctgggacagaatgttttcagtggaggcccgtgggcagctgtggacacccacgcccactcgagttcatgcagg

SEQ ID NO: 50611 - DNA, 390 bp, Mus musculus
  source 1..390: mol_type = other DNA
tggatgtggtcaaggctatctttcaggaaagccagcataaggagtaggcttatgtcccttctaccagaggtaagggaattggtctcacaatttcctgagcaattttatctcacagctagaaatactctactccactttgagcttatatctttcctttgaacctcacatgttaagaatatattgtataacaaaaatgtaaaataaaaacaagcaaacaaaaatgtgtgctgggtctgtttggaacaaagcaaaattacatataaattctacttgtttcctacttttaactcacaagtgctatttgcatcctgttcccagcgggctcacggcctccagccagtgcgcaggcgcagcggtggtcaccacacgtcacgtgtgagacccgttgcc

SEQ ID NO: 50612 - DNA, 409 bp, Mus musculus
  source 1..409: mol_type = other DNA
gttaagagttaaaagcacttactgttcaattaagactacagtcgaggccagcctggtctacagagtgagttccaggacagccagggctacacagagaaacgtggacacacaaaatcttagaagtgtgttgtgtgtgtgtgtgtgtgggggggggggactcggccaaacaaaatcccccgagctcagacccgagctcgcctgaccgagccggcgggctcgaagtcctcggggaggtcggacatcggagccccagccctgcggagaaggcgaggggcagcgggcgcaggggacgccgggagaccggcggcaggaggcgccacacatccggaattccgagcccgccaccccacgcgcccggcgggcgggaggcgggacttccggtccgcagtccggtcagatgtttcccggg

SEQ ID NO: 50613 - DNA, 354 bp, Mus musculus
  source 1..354: mol_type = other DNA
gtggacacacaaaatcttagaagtgtgttgtgtgtgtgtgtgtgtgggggggggggactcggccaaacaaaatcccccgagctcagacccgagctcgcctgaccgagccggcgggctcgaagtcctcggggaggtcggacatcggagccccagccctgcggagaaggcgaggggcagcgggcgcaggggacgccgggagaccggcggcaggaggcgccacacatccggaattccgagcccgccaccccacgcgcccggcgggcgggaggcgggacttccggtccgcagtccggtcagatgtttcccgggcgtctccccgcaacccatttgacttcgctagtcggtgacgcggcg

SEQ ID NO: 50614 - DNA, 268 bp, Mus musculus
  source 1..268: mol_type = other DNA
tggccaagccatgaggccagcctggtctacagaggttccaggacagccagggctacataaataaataaataaataaataaataaataaataaataaataaaatcagaaatctgacgaggtccagctatgtagctaagtcccttctcaacaagatggactgacttttaagaggcagagcaggcaggtttctgtgttccttaagggacaaccgcatctgtggggaggagtcgagcctgggcacagcacagcctcaggggtgaactctgag

SEQ ID NO: 50615 - DNA, 189 bp, Mus musculus
  source 1..189: mol_type = other DNA
ttccatgcatttgcctataaatgtcatgatgtgtttaacagctgagcactactccattgtgtaaacacacattcttactgggttttgagataaatctattctgacagatgtcagatagctgttgaaggctcagtgacagagattctgtgtcccacgaagacttcatgtaaatcccttcactgcctctgt

SEQ ID NO: 50616 - DNA, 378 bp, Mus musculus
  source 1..378: mol_type = other DNA
gtgctttagggtccctaagggctccatctgggagcgcgctaagataccactctctttgttatttgtaaatttaccacaggcttgcagttttaacagtaaacatgcaagttaatctacaagcttaagcgctgcttgttaaaatctaaaaaaaaaaaaaaaaaagatttgcagttttgctttaaagtttttcctttaaagcatctctgagctgcaaaaactcgtctttaggggttgaatattttaaagagtaaaggctgatactttcgaacttggtggagaaagcgagccgcagccaatcgcacgcgctctcccggctactccgcgcacgcactggctgcgcgcgcagttcgcctccagcggtcttgggggagcacctcg

SEQ ID NO: 50617 - DNA, 265 bp, Mus musculus
  source 1..265: mol_type = other DNA
agactctccaagtcatctgatccccagagtgtctgaggaactgtctggaaggggattccctgtactccctcctgactcagaactgggtcaggatgcctgtctcagcctgagtcagtggaacgggctctggttgtcttcatgttccattcttggaacaagaatgatgttctagggcttgggccagaaaggcccggatccaccccctcggggcaactcaggagcttcctgtgtgtctctagtagtgccctgggtcactgagagcaca

SEQ ID NO: 50618 - DNA, 302 bp, Mus musculus
  source 1..302: mol_type = other DNA
cactccacagatacccagtaaggagaaagctcccctctttctgaattctgcctggcatactttgcttggcaaagcaaagtccatagccttcctttctcttcaaacctccagttttctacctagtttctatgtgaaccctactagccttggcaaatcttttaagctatgtttcacatgctgatactgagctgatgaagatggcgtatagggtatctctattccaccccttctactgtagctgtagccacacaggcaggaaggtgccctctctcttcgctcaagttgacaggcatgaggccacg

SEQ ID NO: 50619 - DNA, 389 bp, Mus musculus
  source 1..389: mol_type = other DNA
gctcctaaaaacaatgaggtaactttgttcataatcaggaatgtcacatgtgtctctgtagtacatacacatagcatttacatgatagagacatggtcagcaggtgttagacctaccgaggtcatgttgccttagcaaggctggctctgcctgagaaggccaaacactccacagatacccagtaaggagaaagctcccctctttctgaattctgcctggcatactttgcttggcaaagcaaagtccatagccttcctttctcttcaaacctccagttttctacctagtttctatgtgaaccctactagccttggcaaatcttttaagctatgtttcacatgctgatactgagctgatgaagatggcgtatagggtatctctattccacc

SEQ ID NO: 50620 - DNA, 350 bp, Mus musculus
  source 1..350: mol_type = other DNA
tgaggaagtgtaccttcttcagtttggagaagatcctctccgtccacacttgtggtcaagcttcttgacccaagtccacacagtcttggcctgttcaggacggtgctggcagggcaggtggtcttcagcttgtggacaccagcagccctgctgtcattcaggtgaccagctgcaagtgtctaacgtgaactgcattcctgggaagggctgtgaggcctgccctccaaacacaactggagatggacgtcgatgagcctggaccagagcagcctcaagtgatcagaggctagctaggctctcaggtacctgggcatcttcagaaacacggtgctcaggggctctgcctttga

SEQ ID NO: 50621 - DNA, 321 bp, Mus musculus
  source 1..321: mol_type = other DNA
attctgtgacacagatccgagatgtcttctatggccctaagagcactaggccttggtccttgaggggtcagagtccctgcaaaatcccaggatttttaatatagaaagttcaggaccattcacatggactgggctaagaaatgttctcttatttgcatttcatgccattctcagtgccaggggagggtttcagaatggaactgatgccatggaccatgaacctgctgtcagcctgcacatttgtggtcacccggctgcctcctggaacctacccagtcacacctgggcagtcgtctgcccctcctcccggggttgaggaag

SEQ ID NO: 50622 - DNA, 427 bp, Mus musculus
  source 1..427: mol_type = other DNA
agagcctctgatgcattcagggattgattagaacctgtttgggccaaagacgtaaccaatttcaaatcatagtcatttctgaatgcccaacagagtcgattctttgcatttttaaataggagctaagggaaaatttctttatcccttaaccttgagcctcaaccttcagctttatgtcagaactgtaacagtgggaactgaggtgccctggacagggagctgggggaccagcgctgtcacctcagccaaagtatcctttgtcttcccaggcctcagtgtccttgtctataaaatgggaaggtcagatacgcacggaggccctctgcggtataaaaagatataaaaattacctctgtttggctatcaccaggtgtcacctggctcctcctctgtgtggagacactggacaagtgctctccagtgagta

SEQ ID NO: 50623 - DNA, 391 bp, Mus musculus
  source 1..391: mol_type = other DNA
atgtcttgggaacagggacttgtcctccatggtgaacatacatgtgtgaacttcaagttaattcagtgtctcaactctgaaaatatttaatcactgagaatactaaaagacatagtaaactctgtaaatacaacttttagaggcttatgttggaaaggaaggttctttagcgtccagaggaagctgttcagagtgctcagaggttcagcccaggatgagtcagaacacgggtatgcagccacttgctgagccacactgagtcactcaaaatagaccagaggtttattagcccgcagtttctcataatataaaaataaatggcactttaagtgatttggtgagtcagtatatctgtttttaagacagagtcactctgttaatacaggctggc

SEQ ID NO: 50624 - DNA, 460 bp, Mus musculus
  source 1..460: mol_type = other DNA
gtatacacatttagtgcatgcatgcatgtacattcatggggagagaataactctcatagcaagcttctttacttactgaaccatcttgccctttctcagttttgattactaagaagcaacgattttcaaaactgctattttcttaatacctgcagcattctggaggctgagggtcttgactttgagcccaacctgtgctacagtaccaaaacagggtggagaattgactcaagagggtccctgttccggtgccttcacgggcaccttacaagcatgtgattacatttaagaatattatgcttggagtcttccaacaccaagaaagtgaagttaatcgagttaggattatatcagttttatgaagtaaaacaggagttcgccctcgaattcgttaatggagcttttaatcaaggttccctgcccagggaaactcgcctagcacatcactgtacccaggtta

SEQ ID NO: 50625 - DNA, 581 bp, Mus musculus
  source 1..581: mol_type = other DNA
ttttttcgaaaataaaaaacaatcctcatgcttttcttacataatcatccctccgagcggccgttcagggaccgcgtccgggacccccggcgttcccaggggaggcgccggttggaaatcgcccgtgcccagcgcgcagccccaggctggttctaagacccccgggtgggtgagcacacgccggcccgggtagcccagcagctacggaccctgcggaccgccgggcccggccagtccttgtacccctccctacccccgggggtgggacacaccggggtcgctcccgtcccatcggggggggggggtcctcgccggttccgcccacgcgcgaccaaaccggacaggcaaccgcggtcaaccgccggtggcggcggcggggtcgccgtggctcctaccaaccgggtgccaaaccggttcatgactggggttgcggcgtcggagcagtcagccgggaaggccagagtcgcaggcccgccgcctcccactcacgcacgcagactagctgcagcgcagagcgcgcacgcgcgccggcggcgtcctcgccctcccacctcccagcagcgggcgggggagagggacta

SEQ ID NO: 50626 - DNA, 622 bp, Mus musculus
  source 1..622: mol_type = other DNA
aatttgcaaatcacatggattgtgacattactaaattaaatataggtcactacaaagctagctcaggtctctactaaagaaattttaggaagtgaagaaaaccagagatttctacacagctgtttttttttccttagatgaaacgcaatggaaacattaagtttttctataaagacgattaaggaaaatatatatatttcgccactcaattgagtaatagacttaccctcccaagggaagatgaggtcttactaaggcacagatacattagcatttacttttattgttaaggtgactggacaggggagctgggacccatcgctgcaatctcggctcgcaggggtctgtccagcctccgtaggctgcactgcagaggggcgtgccgggcctttccgcagcaggacgggccggaacagcagggccaggctagtcgttcagcgtcgaggcgctaggacagccgctattcccggcgccctgggctgaggctccaggacggcgccccgcaccggtaagggccgctaggcgccagtttcgcgtgggccgctctagccgcccgcagcttagtccctctcccccgcccgctgctgggaggtgggagggcgaggacgccgccggcgcgcgt

SEQ ID NO: 50627 - DNA, 339 bp, Mus musculus
  source 1..339: mol_type = other DNA
aaaataaaattagctaattctttagaaaaagcaaagtaatttggtgagtgatatttgcatcacatatttggcttgaatttaaaaccggttctaaatttaatcccaacatttattacatagccagatttcaatgttagatgtaaatattaaacagccacagtatttaagacgtttggtttcattaagagctctttcataaaaagagttcgaagccagcctgtttcaccgggctgggttcggtttcccggcggggcaggcggcttgttgcgcccagcgcgtccgggagagctgtccccggtccgcgagcccctttccccgcccacccagcggatcgcgtgg

SEQ ID NO: 50628 - DNA, 328 bp, Mus musculus
  source 1..328: mol_type = other DNA
tagaagtcctgttcccagcaggcctgcacgcatcccacctgtcactatttcccggcgcgagagatggcttcagtcggcgtcccaaggatggggacctagaggcagagccggctctgtgcggggaacccagctcccagggaccaccgctccccgggccagtaagaccgggggaaatgcacccattctctcgccggagatcgaccgagaccagcgagctctcctcccccggccgggcagaaacctctggcggtcgggttctccgagacgccaggttgtcggcaagccccgccgcgcggccttgtgggacgcacgccccgcccctctccgc

SEQ ID NO: 50629 - DNA, 289 bp, Mus musculus
  source 1..289: mol_type = other DNA
gactgataacgagatctagctccctcttctggagtgtcaagacagatatagtgtacttacatataataaataaatgaattttaaaaaatttatctgcatccgacaagtcagggaaaggatggaaggatatcttctatctctcacttcctactcagtctccggaataaatgctgaggttaacgtgtttgttaagagaaactcctgccttctccttaggaagaggagaaaacacttaacttttccttacctctctaggcggagaggggcggggcgtgcgtcccacaaggcc

SEQ ID NO: 50630 - DNA, 500 bp, Mus musculus
  source 1..500: mol_type = other DNA
gatttttttttttaaaagatttatatgtaagtacactgccacgcccggcgggattttttttttttaaaagatttatatgtaagtacactgtagtctttagatacagaagagggtatctatcttgacaaattgcaattttgagaactgaaattgaatggacaataagtgctgctttaaacaatttctagaattccatctttaaagtagttcgagaccaacctggtctacaagagtgagttcttacaaaaggtataaggaatgacttacattcacaggaccagctgtgggccgagcgcttagctgctacggaatgaagtggcagcagcagcttctgaatgcgccgctccacagctcagttcacgtgggctgccccgcggcgctcattggccagctccgcgcgtcgccgcggtcgccgctgccctcgtcctccgccggacccggcgtaatgccggccaatggcgaggcggcttacggcccgccacctgtccgcggcgagggcg

SEQ ID NO: 50631 - DNA, 182 bp, Mus musculus
  source 1..182: mol_type = other DNA
tctggatttagaacaaattattgtaaaataacaagagagatgtttggcaagaatcagttttggtccgagaccaggttttgtacaaaaatcagacttgtagaaaattaaattgctttagcgtctaaagtttaaacacttattactcaactctctaaaagttaatacggctggagtcaaggccc

SEQ ID NO: 50632 - DNA, 353 bp, Mus musculus
  source 1..353: mol_type = other DNA
caggctggcctcgaactcagctgggattaaagacgtgtgtcaccacaccccttaagtacaccagtgtggttccacctggtagaggtaaactttccctgtgcctagacaaagagtaaacttcaattatggtaaaagttttctttcttacagtttgtaacaaacgtggcaataaactacttttcttccaaagtaagcttattagtaaatcctttttatatcaatctactttttctttttgctcaaaaatgactgatcagttaggttcccttaaaaggcataggacctgtttagcaagaccgttcccaatcaaagatggcgccgccgcttcagctgtgggtggggcggcggcccgg

SEQ ID NO: 50633 - DNA, 493 bp, Mus musculus
  source 1..493: mol_type = other DNA
aaagggttaataggctttttcagcatctagatgataacctgattaggcatttactataaactgttaaactcgggaaagtaaaggacttgtaatatttaattttaagtgtgataccaacccgctgcagctgacctgcagacaggaccagatgtgtgaaaaaaaaaaaaaaaagtagtcactgttttaattaagaaagcaaatcttttaaattttttcttgtgtaagtttctatatgtttctgttagaaaaatgaaaaaaaaaaatcccttcgcagggacaggccttgtcccgtctcccagcagtgggatgagagggccgctgccctgtgcccggtctgcatgctgaggaacgaacacagtctgcagagaaagtgccacagcttctttctttaaatttctctaatttattcagaaaacaaaatcttggaagaaaaaaaatagttaccctaattctgctaattatagatgcggatgctctgcttttaagaaagaca

SEQ ID NO: 50634 - DNA, 508 bp, Mus musculus
  source 1..508: mol_type = other DNA
cgagcacaccgaggcagcagcggcgaccgaggcctgcggtgcaagacggcggagaaccccagggtctggccggcctcgtcgcccacagcctggcaccccgaggcctccccggacaccggccgcaggcctcggaggccgcccgctctctcgcctccgcccagccccgcgctccccgcggcctgcgcccgccgcctcccgggccgccccccggccggccggcccgccgctcctgcgggtcacaccgtcgtcgccgcgctccccccccccgccctcccgggcccaggcctgccaggccgagcgtttaccgcggggctggcgccgaggcgcgcggtcactgactgcaggcggcggcggctccgaccttcccacgggcccgacgaggagggcgagggggagggtttgctgtggcagctccggcgacagctccgacatggcgcggctagagcgtcgccgcggtcgccgccgctgccggcgcggtgcattatgggaagcatcgcacacaggaagc

SEQ ID NO: 50635 - DNA, 394 bp, Mus musculus
  source 1..394: mol_type = other DNA
tcaaaggttatgtttaagtattgcagagaggtgctgtgtgggcacaaagctcaactaagcaatcttaggtatgcagagattataaccaagtctttgctgacatctggtttgggccaacgaagcatcgcggtttgcagactccaaccagggccgtgccaggcacgcacccagcctcaaggggaggacgtccctctccaggcccatcagggggacccccagagcggggcccagctttcccggccacgccgcgctgctgacacgcaggcgccagaatcaaagccacgcttggtctcgcagccaggtctccgcgccaagcgagggccggcggcccggagcgcttcctgtgtgcgatgcttcccataatgcaccgcgccggcagcggcggcgaccgcgg

SEQ ID NO: 50636 - DNA, 231 bp, Mus musculus
  source 1..231: mol_type = other DNA
cctgactctggtgcccagatctccccacgagtctcctgcaggatggggagcacggccagttgcctcagcccttctcccaatgtcatggggcaaggtccctggcctcaggaaagccagatcaactcctctggtgggccagaactgtactggccagggtccaggggcctctcaagacagccgccagccctctgggctaggcagctgagcagtagtgttcctgtgtatctagat

SEQ ID NO: 50637 - DNA, 317 bp, Mus musculus
  source 1..317: mol_type = other DNA
tacttacaaagaaaagagattaataccaagcaaatttattgatgacatctttgaagaacattctggggacccaaaagggcggcagtgggttggggcctcttcagatccttaagggcatgcgacctactgtgtggctaaggaactgggaagggggctccatgagttcacccgggggttccgtgaactcacccgggagaccgacctgccctctccccgcccccgggcccccgcgcggggcgggtgatgtcaaccgaggaggagccgcccgccccgcgacccgcccgggctgattggcgtgtggcagcaccagggctgcc

SEQ ID NO: 50638 - DNA, 283 bp, Mus musculus
  source 1..283: mol_type = other DNA
acacctttaatcccaacacaggctagcctggtctacaaagtgagttccaggacagccaggttggcccatcattgtagcccaggctagccttgggtttactgcagctagcgggattgctggcatgtgctgtgtgcccagctcccagcaggtactgaaagcatctgtctctatctctgtgcaagatggagcaatgagcaagacagtgagccctctgcctccctggaccttcctggagttcaggcaagcaaaaactgggcctgaccctgcagggcctcccaggtcc

SEQ ID NO: 50639 - DNA, 471 bp, Mus musculus
  source 1..471: mol_type = other DNA
agacagctcttctgagatcagtgtgacaagcccctctggagaaagtcttaggagaagcctgtctctacccagggccgtggacagaaggctgctttgccaggaggaagcagccttccttctctttgttcttcccttcccttttttttaatagagaggaaggaatgcttttaaaaagtgactatgatgccattcacatttgttttttaaagacagtcttaactaggcaaccctggccggcctggaactctctcccttgaactcacagagatctgtctgtttcaaattggcctctgttaaaattggacccacgacagacggtgggccaaggcttcaagtgcttctaataggagcatttagctctagaagtttctagaaataaatagttggagaaaacatgaaaggacttttcaggtatgactcagagttaaaggcatctgccactaagcctgatgaccatggtgaagggtcaag

SEQ ID NO: 50640 - DNA, 257 bp, Mus musculus
  source 1..257: mol_type = other DNA
ccttgaactcacagagatctgtctgtttcaaattggcctctgttaaaattggacccacgacagacggtgggccaaggcttcaagtgcttctaataggagcatttagctctagaagtttctagaaataaatagttggagaaaacatgaaaggacttttcaggtatgactcagagttaaaggcatctgccactaagcctgatgaccatggtgaagggtcaagtcctggactttgagtcaaggatacaacctgactcaag

SEQ ID NO: 50641 - DNA, 423 bp, Mus musculus
  source 1..423: mol_type = other DNA
tcagtgcttaagagtttgaaaggtggacacaacaaagtttttaagattcaaacgccttaggtaggtttttgcacctacaccgcaagcctgaccttctagctgctgctgctgctgcttctgctgcttcgccctggctgtcctggaactcactctgtagaccaggctggcctaggctgccttacttaaatctggatttcagggaaaaagctaggtgaatattctcgggcgaggcctggcctggcatgcgcttgtggcatgttggcgagcgcgccccgccccctcccaactccaagaccggggagggagaccctcacccgatccccacaagtgggtcagctgtgacagccacctgggcaacccaggatctaggcgtgctggcgggtcccggtgcagggcggagctggtccggcccgagctcgcccc

SEQ ID NO: 50642 - DNA, 155 bp, Mus musculus
  source 1..155: mol_type = other DNA
aggcaacttgtttctttatagataggtcattgctgcaagtaagcaacagttcctcaccatagggcagttataacatctactttaaaagcagtggctgccatcatgatgggcaatatgcctgaacgcatccagcgtcaggggaagcacgcctccta

SEQ ID NO: 50643 - DNA, 183 bp, Mus musculus
  source 1..183: mol_type = other DNA
gctgcaagtaagcaacagttcctcaccatagggcagttataacatctactttaaaagcagtggctgccatcatgatgggcaatatgcctgaacgcatccagcgtcaggggaagcacgcctcctaatccttgcggacgtgctatttccaactcctgcagaagcagccctcggagacatcccaga

SEQ ID NO: 50644 - DNA, 378 bp, Mus musculus
  source 1..378: mol_type = other DNA
gaaaacaaagagacaaaatgaaatctcagtctgtttgataagtggcatttccttaaaataggaaaactctgagttcgaggccagcctggtctacagagtgagttccaggacagccaaggctcttaggggattatcattattattaacacaggctcactagatacctaggtcagccttgaacttggaatcctcccatttcaggttcttacataagggttttgtaaaccaaatatgcttgagttttcaatggtacacttcaagtggtctaaaggaatgtcttagaggatttttattttatggaaagaaaccgggaaaaagcccgcggcccgggccggaaaggggggcggaagaggcgggacttctgggtgacgtcacggg

SEQ ID NO: 50645 - DNA, 272 bp, Mus musculus
  source 1..272: mol_type = other DNA
actgtattaggtaccttgtgaactccatgtagtttacttcctccgtgaagcaaatgctaaccagggtttgaacttgaacattagtgcccagtctctaatagaataagtaggaagaaaggacctgcaagctcttttctagcctgaggtccccacaatgaggcagtcagactcctggactttttggactggttccagagtccaggatggttgaggttcatgcaggctcagtctgcacacggcgtgggctcccagcacagtcagcctctgtgtgg

SEQ ID NO: 50646 - DNA, 295 bp, Mus musculus
  source 1..295: mol_type = other DNA
ctgtttttccatttgtaaaatgggcgtaagagccattataaactggaccatttttaccagtgtctactaaactctgagttccaggctttaggctagcactggaattctatcatgagttagtaatcgaaataatgtcaacaaatcagagcaaagatgtgcaggggcttcccgagagctgttcatagaaacaactctgagatgctcataagcctatattcttggccctactttaaaaaactaatgtaggctgagaagttgagccaaagaatctaagattccaaagctttgtgatcca

SEQ ID NO: 50647 - DNA, 378 bp, Mus musculus
  source 1..378: mol_type = other DNA
ctctgaacagtgctggtccagagctgccctttgggttcttatgggaccaaatggttcccatatatgttcatttctcagacacgtaaaccaccattgtccaattgtcacaaatgctttttgaccttcactctgaaagtgcgcagtctctctatctgtagatattttcataaaaatatgctatttacattaaaatctgagaaatttatttatttaaatttttcaatttgtttctaaaatagtaaatgctgatagacttaacaaaatacatactcacaaagtaatttttaaaaatataatcctgagagttccatccttgggacccacctgtggcacatgtgccccacctgactcaccagagacattgtatcatttgaaagt

SEQ ID NO: 50648 - DNA, 588 bp, Mus musculus
  source 1..588: mol_type = other DNA
aatagggtgtgatagcatacacgcaaaattatgcgcgcgcgcgtgtgtatacatatatatccttctttaaaatgtcgtatgcatatgtgagtaccacttgtacaactggtgcctgatggttgtgacccactacctgtgggaagttttttaaaatcaacacaaccctttttttttttttttttttttttaacaaaggtagccatcttaccatagaaagaagagtcaaccgggttaatttctctccaacttgatttaaaacaatcccaaatatagtgtctcaaacacattctctatttagttatcagtggtaaaaaatactgccatcctttatcaacagcaattatctcgatagaaaaattgaacactgttcaggttagatttctattgactctcaagaacaagggctagcagccctggttcccacttcaaccagtttgaagaatggccccgcccccgcgtccgccccgccccccgggccgtctgttggcctctcccactctccgcctgggcgtggcaagctggagcacgcggagtctgttgcgcacgcccagggctccaggttcccggcggtccgcggccttcttcccg

SEQ ID NO: 50649 - DNA, 378 bp, Mus musculus
  source 1..378: mol_type = other DNA
attttacgaactatatctaaacttcagttcaccagatgctttacagaacatcaaggttggcttttcgatttatgagcaattgcattctaattagtgaatgtaaagtaacttgtccaaaagtttgtagctagaatagctaatttttttttggtcattaatagaaaggaaattgcatgtaatataattttgaaagttaagtctttcaggaaactttataaaatatgtttcagtatatggctgttaacagctcttatcaatgagaaagaaaattaattttccaatgagcctggactggacagtctggaccaggacggacgctggagtcccaggcgggagtgcaggtccattcctggagcttcatgcaaatgacatgcaaat

SEQ ID NO: 50650 - DNA, 439 bp, Mus musculus
  source 1..439: mol_type = other DNA
atttattttgaaatatgtatattttccaatacaaccttgtatatgctccacaagtacttcttggaatcaatacatattttattacattacataaatgccagtatatttatgaacactgatagtaaggtactttttatgaagaaagtactaaaaaactttcagaagttatttctgatctaactcagtgattgaccttaatcctctttaataaaaagcaggctaggctatttccccggaagagaaagataatatgttacaaaaatgctggttccttctgctctgtacaggggtaaagatacctggtacctggtagaggctaaaggtgaggcccaggttcacattaacggagacgagcgcctggagcgtctttgccctcatccaagatggcggcccccgtgggcgctgtcccggctccgccccgtgccgcggccccgcctct

SEQ ID NO: 50651 - DNA, 380 bp, Mus musculus
  source 1..380: mol_type = other DNA
caccgggggtgcctgaggagggaaccctgggttctgttcactgtggtagcagagagccaggaacatacccacactctaccatgctgttgtttgtccaaagtgaataagattgcaacagcaggtctctgctgaaaattccaagcagtcagaattgtgaggcttcactgaaatgtctgagttttgctagcagaacagaactttcacagtacgtagatgttatatggcagatccttatactggtcagcaaaagtttcaccctctcatggtgtttgtctcaggcaccagcatggaccctgactggcgctggggccagcctgggtaaggcttgcccactgggcccagtcagcaagctgtgctttatataaactaaaaagagtttt

SEQ ID NO: 50652 - DNA, 505 bp, Mus musculus
  source 1..505: mol_type = other DNA
ccgcccacattgggcggggcttcttgctatgtgaaggtttctgtcgagttgctcacaaatcatgtttccagggtctagaacatttttaagggtcccttaatataccttgaccttaaaaggtacgtcagtaccagtcaaatgtacatttctgtaacaatttaccttaatgccttttattcctattacaccttaaaaggagtgctatttaattgacattcagcatatccttgtttaataatacttaacctcgtgaaggaagaagatcctttccctgttcaccagagagagcttttcctctgtcccgagtggcgcacgagagacaaactgagattagccttatttccgaaggacagcataattctcttcttagaagagaaggcaatctcctgcctgccaatctccgccggaggaggcggggcggcgtccgataggcccgtgcgagctccgccggcgccagccacgttggacgcgggcatccccgctggaaggccactcccggccccac

SEQ ID NO: 50653 - DNA, 815 bp, Mus musculus
  source 1..815: mol_type = other DNA
acccgatcgggggtggattgcccgctacccaggtccgacgagggatccgcccgttgacccggctccaggcaccagggagaaggggagcgggggtccctgcggctcccgggcccggcttgagtatgttcgcggggtgccggggccaggacgcgggcggcggcagggcagagggcggaggcggccgcacgccgctgtgagccgaggcccgagcggcgcggggggcggggaggcggggatgcggagggcgctccggcggcggcggcggcgagcgggcgaagcggcgcgagcggccggagcggcgcagggcccgaggcgtgcatggcgcgcccggagccgggctccctcgggcccctcgggagcgcccccggggcgccgcggctcttcggccggcccttatcggccggctgctgttgagccgcagccctccatcgctggatgccgtggtccccgggagaagcccgcctgcgttggggcagaacggcggcggcgctgcgccggattccgccctccgcgtagtggtctgcgctcggctacggtgggccagccgccggcaacgaggaacccagggcttgcggagctagcgactcaaccctcgggacctgccggaacgggccggcctgctgggtctgggaggggaagggccgcaccgcaggagccggtcctcgcccccgccccctgcgcgggcacgccggaggctctgttcgcctttcgcgggggccacgctcccactcgcgcctccggaggtgggggatgcgggcgacggcccccccgggctccaggaccctcctccccggggctccggagctcttgctccg

SEQ ID NO: 50654 - DNA, 365 bp, Mus musculus
  source 1..365: mol_type = other DNA
catcaatggatttctgaactgaaattcctttccaatctgtttacacaaaaaaaaaaaaacaaaaccaaaaccattttttccaatttttgtatattttatataaatgcaatcatacaatatacaacattttgcatttggctttttaagaatcagcatcatatatttttgatatttgttaacaacagcgctgctaggaacattggtgtgctagtactacttgaacacaattgttttcccgacacctcaataatgttttgtcaaggggaaaaaaaaagcctcgggagcagatggcattttccatcctccacaggtcaaaactcaggcaaagtcgcttctcgtgaactcccggcaggctccttcccggg

SEQ ID NO: 50655 - DNA, 226 bp, Mus musculus
  source 1..226: mol_type = other DNA
cttattttataattaaagtacctcttctgttcagcagaggtagccctagcatctaggatttgaagcttaatcccacctagcttggtgtgcccaagatcttgtagcttgtgaggttaactagcaaagctaggggccggagttctgctagggggcgaaatcgggatgcagggcgccccctcgcgctctcccgctctcctccgggctggcgggtgaagcgccagcagtc

SEQ ID NO: 50656 - DNA, 300 bp, Mus musculus
  source 1..300: mol_type = other DNA
gttcagacatgagtaaggtcaggggttcggctccagttatggagctgaagctagaactcaagccctaaactagttttatacttacatagggggaaaaaaatctatgactttctctgtcctggaagttcacattagttcttcaggagtcctaaggaatatctagagagcctcaagccctgctgttcttccagaagttaaatacatacatacatacatacatacatgcatacatacatacatacatatatttttttaaaaagtgaacttcccttctatattgtaggggctcaaatagatact

SEQ ID NO: 50657 - DNA, 348 bp, Mus musculus
  source 1..348: mol_type = other DNA
caaccccttgaaggcgtgacgcacaggcagctgtcagagttctggatttgtgcatttgaacaaatgaatgtctatgtctatgtggtcaagagatgcacaatctcacataccaagagagagatctaggtcactgtcttctacccgtttgcatgacaaacaaaatgggtagaaaaaactctttatatgtatgagtcttcagtatcctgccgtctataatttctgcagttaggagtgactgactcagcctacttcgctccagtctcccagtagggtcccgggcttctccccggggcattcctgggttcccagcgagcagggtggaccccgcctcgcctcctcccctcgggc

SEQ ID NO: 50658 - DNA, 369 bp, Mus musculus
  source 1..369: mol_type = other DNA
aggaggcgaggcggggtccaccctgctcgctgggaacccaggaatgccccggggagaagcccgggaccctactgggagactggagcgaagtaggctgagtcagtcactcctaactgcagaaattatagacggcaggatactgaagactcatacatataaagagttttttctacccattttgtttgtcatgcaaacgggtagaagacagtgacctagatctctctcttggtatgtgagattgtgcatctcttgaccacatagacatagacattcatttgttcaaatgcacaaatccagaactctgacagctgcctgtgcgtcacgccttcaaggggttggcgtggccacgcccagcgccgtcacgtgacc

SEQ ID NO: 50659 - DNA, 385 bp, Mus musculus
  source 1..385: mol_type = other DNA
gaaaagtcaagcacttcactgtttctgtgaacgaaaaagattcatgccaggggtccttccagtactgtaaaatatagaactttacagttttgtgaaataagacttattgcccccattcctaaataaaggaaagaacagttttctccttttaaaagattatttgtttctcatctttaatagatcaattcaacatgtctaacttccagacagggagcagtctagacgccgtttgctcggcacgaacatgatgacttacggtcagtgctcagagcactatgttcagagagagatcttgtctcaaaaagtaaggtgactcaccattgtggtgaggggccactaacagacgtggcagcggcggcctctcgcctcaacacgtgcacatgca

SEQ ID NO: 50660 - DNA, 249 bp, Mus musculus
  source 1..249: mol_type = other DNA
gggtgtcggagccccaagagccctagaccagtagcgggaccagagccctctcctgagcacccaggtcaggctgggagcccaaagcatggacgccagcacgcgttcctcaatgggtggtcccccaagtgagcaggcatcagggctcagctgtagctcaggtggagtgcgggcggggcccagctctggagctgctaaggatgcactattccaatcctgggatagcgagaagttatctcaatgttaaaactc

SEQ ID NO: 50661 - DNA, 387 bp, Mus musculus
  source 1..387: mol_type = other DNA
caataccaatgcaataagtaatgcattggttcaccaagtcaaatgcatacagaggacctgaacagtgcattctggaatattttagcataggaatataatttggttattagaaatcacatttctagtctgggcatgcactcacaatctagcacttaaatggtagtggttgaatctctcatttcaatgacattgaataatggttattcaagatcaaaaagtttagaatgtatattcatttgctgactctcagaaaagaatgcatgaaaatgcccccattgaggacaaactatcttcagataatttttctttgactttcctctttaaagtcatatattacttttgtagtccttaaaaataagtcaacggaatctttatttacaacattaa

SEQ ID NO: 50662 - DNA, 302 bp, Mus musculus
  source 1..302: mol_type = other DNA
ggcaagcaggccaaaagcaaaacttcctttttccttgtcctctagctggggttttaaactatggtgttaacctttagaattaacacacataaggaagactgactctgtgctcagttcctcgttacctccctctctagggactcagggaagcaagattcgctaacttaaggcagtaaatactagttacaacaatcatttcaaaaagtacaaacaggtgaaactctttacccctctgagaggcctgaacctgggatccgggttcccgccatagaaggaccggtgatggctctgagagcctgtct

SEQ ID NO: 50663 - DNA, 336 bp, Mus musculus
  source 1..336: mol_type = other DNA
aaactatcttcagataatttttctttgactttcctctttaaagtcatatattacttttgtagtccttaaaaataagtcaacggaatctttatttacaacattaatctcagatggagtcgaaccgcgacctcatcagcggctgaggctctctccgccactgtgggatggagggagtctgtggaccgcactctcccacagacagagagccacactcggaaaccggtgtccggggcgctggggcccacgggctggacagagcactccccacctcccgaggcccggctctggaagtctcccgcagccgtacgagtagctcaggggcgctgcacagacagg

SEQ ID NO: 50664 - DNA, 199 bp, Mus musculus
  source 1..199: mol_type = other DNA
cggcaatttccagcgaaaatatttgcgttgctaaaatatttagggaaatgacttaaccgttacatgatagaattttttgtcgagacccatacaccacgcaggggtagaggagtctgagggaattaggccatctggccgggggcgggggcccatgttgtactgttgtcggagcaccattacctgtacacagaattcacca

SEQ ID NO: 50665 - DNA, 336 bp, Mus musculus
  source 1..336: mol_type = other DNA
actcctctacccctgcgtggtgtatgggtctcgacaaaaaattctatcatgtaacggttaagtcatttccctaaatattttagcaacgcaaatattttcgctggaaattgccgtttcgatttaatgttatatgatactaataaattaccgctgcaaacgggttgcagaattctttgcgtgagacactgacgtattttgtatgtgaggtacctaccatccacgccctggccgccgccttttccctggccgccgctagcctagggcgtccacgctcggagactccgcttcccggcagcccctgcggcaggcggcggagaagcgcacgcaggcgcgccg

SEQ ID NO: 50666 - DNA, 478 bp, Mus musculus
  source 1..478: mol_type = other DNA
gagctaagcagatcctagtaatttgttaggacagtttgttaatattagaccatgagtaacgacaaacagttttacttacagcctttcaatggttttctagtcattagaaaaatatatatttacttgaaataaagcctaaaatttgttattcaatgtgctttaggtgagttaataaaaatggaaagtttttgaattgatgatataatctctatatcagaagattggcagttctccagaggaccttccagcactaactccatttccaggatgatgggactcctgaccctgagggtaggtattgcattcgccaggcagctattattattataatcttggcagggtgggtgtggacagaggtaccctcaatatgcacagccttcatgaagtgcctgctgcgggattcggcgcgtgcgcagcctggcaggatgcgtacctagcgtcgtcctgggctctacttgagcctctcataggtgcagcc

SEQ ID NO: 50667 - DNA, 427 bp, Mus musculus
  source 1..427: mol_type = other DNA
aaatactttatcaagtacacaaaatctcaacttagaagtagggggagaactacatgacccggtgagcctcgacaagcttgccacgtgtggaaaacccttcacagttcacactgccactgggcgccgccatccccgcagccgaccaatcaccgtggagcagaggtgtccgcggtgctgcctgacagcaaataccgtgagcccgggcggttgccagcccctcatgtttttaaaaacatagctggaaagcaggcttccttcgggcattcccgaagcccggacgccatagggccctggtcccgagtccctccgcgtgtgccttcatcatgcccgggcaggcagggcgtttgtcctccgctcgtcgcgcacgtcccgcacgcccgctgcgtcacgccggcacgccccgcccaccccgccagcgccctcccca

SEQ ID NO: 50668 - DNA, 477 bp, Mus musculus
  source 1..477: mol_type = other DNA
gcattgcttcaattacatttacaatatacattactccaataacagtggagctattctttctctaaaaatttaacaactctgtagtaatttcaggtaagctaccctctatgatttctcaacttgatagcagaccttacgttattagcatactttgagtccctcacctaaagagggaaagcattacttccgtggataactcttatgaatgagcgccagataccagggtctcggccagccccccgcgtctgctaaggcgctgcggtcctgcaggcctcctgccgcccgcagacccgcgtctcaccagccgccaggcgcaggccgccgaggctccacatggccacccgctccgccgacgcacagcaccccacggcggccgcggcgctggcgctcaatgtcaccaagggcccgcgtggggagggcgctggcggggtgggcggggcgtgccggcgtgacgcagcgggcgtgcgggacgtgcgc

SEQ ID NO: 50669 - DNA, 553 bp, Mus musculus
  source 1..553: mol_type = other DNA
ctttgagtccctcacctaaagagggaaagcattacttccgtggataactcttatgaatgagcgccagataccagggtctcggccagccccccgcgtctgctaaggcgctgcggtcctgcaggcctcctgccgcccgcagacccgcgtctcaccagccgccaggcgcaggccgccgaggctccacatggccacccgctccgccgacgcacagcaccccacggcggccgcggcgctggcgctcaatgtcaccaagggcccgcgtggggagggcgctggcggggtgggcggggcgtgccggcgtgacgcagcgggcgtgcgggacgtgcgcgacgagcggaggacaaacgccctgcctgcccgggcatgatgaaggcacacgcggagggactcgggaccagggccctatggcgtccgggcttcgggaatgcccgaaggaagcctgctttccagctatgtttttaaaaacatgaggggctggcaaccgcccgggctcacggtatttgctgtcaggcagcaccgcggacacctctgctccacggtgattggtcggctg

SEQ ID NO: 50670 - DNA, 502 bp, Mus musculus
  source 1..502: mol_type = other DNA
atatgtttcatcatcaaaaaataggatggaatgcatccttttctttaaagaagtctaagaattatataaagattacagacactctgggtactatacatctaacaaaaggtgatttagcagtttttttgcatctccctagtgagaaaaattttggctattttcaaatatgtgcatttatcatgtttatcttgatttctaggattgtctaaatacaaaagaacacaagccatgtctttcacagaataactcgtagcagaagaaatgatggtgtttgcttttctacagacagtttcattatctttataaatttgggtggatcctgagcaaccagccttgacattattaagtattctctttaaagaagtctttgaggttttatacatgtggagccatgttcaccatacctgagtcctgatgcaataaggcttgtcatttccccattccctcagatactgtggtgattagacatttcataggaggagtttatggatacctttaaaat

SEQ ID NO: 50671 - DNA, 408 bp, Mus musculus
  source 1..408: mol_type = other DNA
taataagatgctttacctcttacatgggtgagatattacctgataagttatctactgactaaggacagcctatgctacagagctctaggacagcctgggctacaatgcatgctcttctaaaaaaggataatcactacgtgggatgcaaaggaaggcagatctctgtgattttgagaccagcctgtaataatgttatttttcatgtttggggataaatatttctgaaagtacaagtaaaaatccactgtagacagttttattatctttataaagttatcagtcttgacattattaattattctctttaaagaattcttcaagaattaacctatttagaaacttaggttatgtttgtccttcctcttatggcacaacatagtaacattacagttcctctgatactgtgga

SEQ ID NO: 50672 - DNA, 369 bp, Mus musculus
  source 1..369: mol_type = other DNA
agataatttattttaaaacagtctcagtaccctggtaagaaggattttgtttttaaatatgtgtattttaatttcatcttgatgtttagaattgtttaaatacagaagaatacaatagaataacagatatctatgaatatgtcacttggtcttctaatgagaagccttatgttaaggccatgcctacctaggacagtctttgtagccagcctgaaaaaagtctgaattctctttgccatgttattattcatatttggcgataaatattttcaaagctgcaagtaagattatagtcttcaagatttaacatatttagaaactttggttctatgacattatgacacatgtctaagaaatgcaataagacct

SEQ ID NO: 50673 - DNA, 539 bp, Mus musculus
  source 1..539: mol_type = other DNA
gggggttgaccccaagttcctgaggaacatgcgctttaaggcagtgagtgcgcgcgcagaggccatcaaggccctggtgaagcctcaggccaccaagcttgggaagtggattcgaagctacatagccaagggtcagaggctctgccaaccgaagcctaaggttcaaaccaaggcaggggccaaagctccagctaaggcccaggcttcagctccagcccaggctgacacctctccacacactatttgcagatgaccagtgtcctatgctgttcttacaaataaactcaggaatgatggtgtttgccatcttattgtaacaatctccttagacagttttattatctttataaagttgggctaggtattctctttaaaaaactctttaagcattaacatattttgaaacttaggttattcatacccttctcatcctgagtcctgggcacacatgcttagggatgcagcaagacttgcccattccctcagataatgtggagataaataattataggaggtttttacagatacctttaaaaccc

SEQ ID NO: 50674 - DNA, 258 bp, Mus musculus
  source 1..258: mol_type = other DNA
atctatcaaaataaaaaccaatctcttttaatttttaattaaatttgaaatttctacttttcttctgcctcctgtcggggagctggcttagagagtagcaggaaaacagcttcctgggagcctgagtatacttataagaagattcagaatatgtgttcatctgactaattagttaccaatgcataaccagtggtatcgattgcaaaatatttagaacaaataaggtaaaggcttcctggtcagcaggatggagcaagc

SEQ ID NO: 50675 - DNA, 428 bp, Mus musculus
  source 1..428: mol_type = other DNA
taacagatatctatgaatatgtcacttggaactgacctttctttctgatggcatcattccaatgggcaggtatgtgaattcttctaatgagaagccttatgttgataaggtacctactgactcagacattcaaggccatgtctgtaaccttagccctcagacccagaagctcaaggttcatagtgagccccaggacagcctggtgagtttgcagccagcctgaaaaaatgttattattcatatttggtgataaatattttcaaagctgaaagtaaaaatctattatagtcttcaagatttaacttatttagaaactttatttcttctaagaaatgcaataagacctgcctgaggacttatttctcagttcctctgatactgtggaaataatacattagaggaggagtttacagatacctttaaaactc

SEQ ID NO: 50676 - DNA, 376 bp, Mus musculus
  source 1..376: mol_type = other DNA
tctaatgagaagcttatttaaggccatgtctgtaatcccgagagtctgaagttcaaagtagcctgggctatagtgtgaattctaatccagcctggtttacatgcaagcctttctaaaaaaggtggaggcaaggacaggacttctctgtgagtttgaggctaacctaatcacagtgtgaacgatagcgtttgccatcttattcttcatgtttgtggaaaaacatattaaaaactgcaagacagttttattattaggtattttctttaaagatctctttaagcgttaacttatttagcatatgacacaatatgatggcattatcctgagtctgggcacacacatttccccattccctcagataatgtggagaaaccct

SEQ ID NO: 50677 - DNA, 399 bp, Mus musculus
  source 1..399: mol_type = other DNA
tggtctcttaaatagagtttctaagctttatagctgtcatgaaatatttacaagaataaaccatttaaaattggcagacttcccagaatttgaataaatgagagtgtttgccatcttattcttcatcatagacaattttattatctctatgaagttgggtggatcctgtgcaaccagccttaatattattaggtattctctttaaagaactcattaagtgttaccatatttagaaactcatatgacacaatatgatggcattattggtacaaagagtgggagccatgctcaccacacctgagtctgggcacacatgcttgctagggatgcagtaagacttgcctaaggccacattcatttccccattccctcagataatgtggagataaacctttaaaa

SEQ ID NO: 50678 - DNA, 464 bp, Mus musculus
  source 1..464: mol_type = other DNA
tctaatgagaagagatattacctgataagttacctactgactgtaaacccattacttatttaaggccatgtctgtaatcccgagagtctgaagttcaaagtgcctgggctatagtgtgaattctaatccagcctggtttacatgagagcctttctaaaaaagcaaggacacttctctgtgagtttgaggctagcctaatcacagtgtgattgccatcttattcttcatgtttgtggaaaaacatattaaaaactgcaagacagttttattattaggtattttctttaaagatctctttaagcgttaacttatttagaactcatatgacacaatatgatggcatgcttaccacacctgagtcctgggcacacatgcttgctagggatgcagtaagacttgcctaaggccacactcatttccccattccctcagatatttcggagataagatacctttaaaacccc

SEQ ID NO: 50679 - DNA, 368 bp, Mus musculus
  source 1..368: mol_type = other DNA
ccaggacagcctatactagagagctctaggacagcctgggctactgcatgctcttctaaaaaaagataatcactgtttatgttgggatgcaaaggaaggcagatctctatgattttgagaccagcctgattcgtaataatgttatttttcatgtttgtacaggataaatatttctgaaagtacaagtaaaaatccactgtagacagttttgttatctttataaagttgatcttaacaatcagtcttgacattattaagtattctctttaaagaattattcaagaattaacatatttagaaactcaggttaagtttgtccttcctcttatggcacaacatagtaacattatgtaagacttgcctgaggt

SEQ ID NO: 50680 - DNA, 435 bp, Mus musculus
  source 1..435: mol_type = other DNA
tctgtaagtcaaaccccacagaataaagaagcctaagattctgatgttatataaagattgccagacactctgggtacatctaaagaaaggtgatttaacaggttttgttttgttttgttttgtttttatagacaaaatctcaggctcctaataaaagggattttagctgtttttgatttaccttgatttctaggattgtttcaaatacaggataacacaataaaataaatgcttatgtctcagaccctttctctgtggtggaatcaccccagtgggcagggatgggtgagcagcaagaagctttatgggtgagatattacctgacaagttacctactgactgatctcagtgactaatctctttaaagaactcttcaagcattaacatgtttacaacatgatgataggaagatttgcctgaggcactctaaaaccc

SEQ ID NO: 50681 - DNA, 356 bp, Mus musculus
  source 1..356: mol_type = other DNA
ccatgattccaggcctgcgtcaccacggccggcttccagttggcagcagtgtctacactcacctagctgaagcttccaggcaaatggccaggttggctaatgtctggaagacactgacccagtggctcacatatcacctataagccatgctacagttgattaaacatgtgtttggaatgctgaaataagaactcatttctatcagatatttttgtgatcacagtaggctggctctaccctagggttagctctaagaagtaaagtccttcttatttaaagatttgttaatggaggctgttaatttatcattaaagcctcttatctgtgatagcttctaacagcaataataaaaggtt

SEQ ID NO: 50682 - DNA, 302 bp, Mus musculus
  source 1..302: mol_type = other DNA
atgttcggtttaaatcttgagattaaaaaaaaccaaaaaagcagtgccttaaaccacatatgatggtttcctcgtagagggaggacactgcagggatgttctcctcagcagggtggagcagctctgatggaggggctccagcactgccttgtagaagcctctttattgcgatatagttgtctgaaggcaacagtcacctatatcaagtggacaaagttggtcagttgatttgtttttacagttgaatttttaaaaattggttattttctttatttacatttcaaatatatcttcctcaagtc

SEQ ID NO: 50683 - DNA, 346 bp, Mus musculus
  source 1..346: mol_type = other DNA
tgtgtaaactgccttgctatctatttacattgcccagactttccaagtagaactagttgtggtctaaaccttgtgtacagtgagagagggtctttctttcttcattttataagcgtggaaaaattctactttttagaatctttagtttgaataaagaaagacaagaagtaaacatcagaagtgtacacctccgcgcgcgcagacgacctggcagcctgtgacaggtagggcggaggcttgcggtccccaagccggggcggagcaggaaaccgagacagccctgggctggggcggagctcagagagcctcaggtaccggtgggctgggccgtacctgtgggggccag

SEQ ID NO: 50684 - DNA, 411 bp, Mus musculus
  source 1..411: mol_type = other DNA
gttaaattttatttcttaatgaatgaatgaactgatttttgaagagataaattgaaagaaagcgactttagcaagggccattagaaaattccagatctgccactttactctgatttcttggaacaataattgtggtataataaagatagcagtaaaatgtatgaaaaccaaaggtatgcatgcatacatatatgaataacgcatatacattaacatggcacataataagtgcccaataatggcagatattattaatctgaaatcagccttctgtgtgacctgcagggcataatgttctaccactgagctgtgcgccaagatgctgcattgaggtatttttctcaaacagataaccctaatcgtaaggctgacacccacagggttaaacctatttgctgggctggcagcagt

SEQ ID NO: 50685 - DNA, 519 bp, Mus musculus
  source 1..519: mol_type = other DNA
tttcaattttatatacattcaattcaatgtagggtataatgtatctattgtcacaatgtgtattccaattgctatgaataaaatccactgaaagttaagaacatttaatgcttgcaataatacctagaaagcaactggttcataattttttgcacatgttaaattttatttcttaatgaatgaatgaactgatttttgaagagataaattgaaagaaagcgactttagcaagggccattagaaaattccagatctgccactttactctgatttcttggaacaataattgtggtataataaagatagcagtaaaatgtatgaaaaccaaaggtatgcatgcatacatatatgaataacgcatatacattaacatggcacataataagtgcccaataatggcagatattattaatctgaaatcagccttctgtgtgacctgcagggcataatgttctaccactgagctgtgcgccaagatgctgcattgaggtatttttctcaaacagataaccctaatcg

SEQ ID NO: 50686 - DNA, 410 bp, Mus musculus
  source 1..410: mol_type = other DNA
tataacctctttttcaacaatattagagataacctattaaaataggaggtagatttttaaagtaaagaaactagataaaaaaatctttcaatttttgataatcagtaattacttagttgaccatgaaatctgctgtgggacgccaggtgcctgcacagaggctggcaactggatcactgtgccatctggtctcccggggagcaaagagcagtaacccggggtacagtctgcactcacagcgcacggtgtggaaggcacagcgcggctgcttctcgaaactttcgcctagctgccacagcctctggaacagctgcactggctgcgagcttgagtcggtgcccagacgcgtgcggccgccccttggagcgccccgagctgccccgcccctcgccccagggccccgccccgcc

SEQ ID NO: 50687 - DNA, 306 bp, Mus musculus
  source 1..306: mol_type = other DNA
aagagtgagaccatttcttttgttacatggttttattctttgacagttcacacatgtatgcattttgatcatgaacatttatgtcactaaaagaaaaataaatacattgagtttaattagggttgctttcatgattatatatcctgggaaatttaccgatggtgacatcatccttaggggaacgtttcaacttgtgacgtcaggttgaaatcggagttccgtaatccattggcgtaacgcagttagttacaaacaaggcgtgcctggttcccatagcaacgccctgagcaccgctccgataggtcg

SEQ ID NO: 50688 - DNA, 537 bp, Mus musculus
  source 1..537: mol_type = other DNA
gcctgcacagggctggggcaggttgcctctagcgtccccggctcggtgcccaggctggcttgcccaggccgctcggacacagggccgtccgtgcacgtagggctgaccagctcgcccgcctccggggctccccggggaggaacgaccctgccggcagactgactgggtgtctgtgtccccgggccgagtacggcggcgggcactgggcgaccacctagggcgggcgggaggcggcggcccggaggtgaggggcggggcggccggctgagccgtgtcccgagccccttggcccggggctcgcagcagagccgttgcggagctccccgcggagcctgcggctcccactcacctgcaggcggccgtcccagccaactccggccaagcacggcgccaccgtcgacgcgcccctgggagtcagccactcgccgtgagacggaaggctgaatcaaggcgtcgacctatcggagcggtgctcagggcgttgctatgggaaccaggcacgccttgtttgtaactaactgcgttacgccaatggat

SEQ ID NO: 50689 - DNA, 305 bp, Mus musculus
  source 1..305: mol_type = other DNA
tttatgtcactaaaagaaaaataaatacattgagtttaattagggttgctttcatgattatatatcctgggaaatttaccgatggtgacatcatccttaggggaacgtttcaacttgtgacgtcaggttgaaatcggagttccgtaatccattggcgtaacgcagttagttacaaacaaggcgtgcctggttcccatagcaacgccctgagcaccgctccgataggtcgacgccttgattcagccttccgtctcacggcgagtggctgactcccaggggcgcgtcgacggtggcgccgtgcttgg

SEQ ID NO: 50690 - DNA, 514 bp, Mus musculus
  source 1..514: mol_type = other DNA
ttcagcagaggatcactgattgcttagcacaagggaggccctcacttaagccattctcctcagaagagcacagaatgtctatcaggttggatgcaccttgatcggctcagcatctctgctggtgaatggagcacgagcagagcaggcaggtgctgctagacgctggtacctgtgtcatctatgtgaaacaaggcaacggtgaccgtgggacacactgacagcagtgtgcacggtgcagacgcaccctgtcctgtgagataattcttaactacagggacataatgggcaagtatgtcttaaaggctgtctttaatgccctgcctttcatcatagttaagcaaaaatcttaggttttccttttaaatgccaagattcagggaaatttcccttccatgtgtcctttcatgtggatttcctggcaaaccatgtgatttcagtgaagttgctgctcagaatagactaaagttttatgtaattccaagtttccatcacaggaggtggtttgcatctcatt

SEQ ID NO: 50691 - DNA, 446 bp, Mus musculus
  source 1..446: mol_type = other DNA
ctaccaactgccaaggtagttggagtacagagcagttctctaagtaataaggaggctggtcacatggcttctcacgggagtgcgcacgcgcgcacacacacacacactgtcgggaagagctctttatgcaaagatgttccaaagacagaactaggtctgagattaaatcagcagaactgataattaattgtaaagaagacaaaagaaacaagaaggtttgagttttattcttttaactgaataccctgttaagagaaaatatggtgaaagtattttttaaaatgtgcttttgaaccgacttgtagggtaaatgtaacgtttcaatgaggctaacagtcagatcacggtcactggtctctctcatgtcagtcaaatgtctgtgttgggaacattattccttttttaggactgaataacattcaatctatatttatctgtattacaca

SEQ ID NO: 50692 - DNA, 268 bp, Mus musculus
  source 1..268: mol_type = other DNA
aacacaagatggatacaatgttatcatttctattgtctggctttgcttgcccacataaacaaagataatattcacgttattttttttttcaaagaagaggttgaaagaactatcctgagaagtctttcttttcacatgtaaaaaggctccctttctctgccacctgggaaaggccagggccagaggaaagcagatggaactgtgtcccttgcacaacttgctacttcagccagtatatagttttatttttaactttgaaacgcttgaa

SEQ ID NO: 50693 - DNA, 271 bp, Mus musculus
  source 1..271: mol_type = other DNA
taggattatttttcaaccagagatccttggaactaagtcacctgagcatgtcttgacttgacagaactctgtaagtgagtgtttttaagacttcccttcaaaattaacatacagatcatttttttttcttctacaacaatgttgtagcccagggtaccccttggtaggacacagagcagtcctgcagcacatttttataactttcccgtgacctgaaaaactttgcaaaatactcaaagtataaggaactgactcaaacttcaggaagtaa

SEQ ID NO: 50694 - DNA, 431 bp, Mus musculus
  source 1..431: mol_type = other DNA
gatcatacaatcctcaggatataacagaagtgcagttctcaactcagagggaataagaaaatttattctggaacaaatatgagttactatggccccagggacaaatttaaattgttctatttatatttccgagcaaagagagctataactgaagacgtttaaagatacattgatgttaatggaaacttcaggtctgctgtaaggctcagatgcatataacatgcttagcttttgggttgattcccttgtgtatcacgtatttctaccaaaaaaccctacttttttttttttttttacacaatctgaagaaacaaaaaagaaacaaaatagtaaagaagagatactttcctaatctattcactcattagcttgtttttagaactatccccagccgccagcggaggccggaagccagatatcagcgcgggctg

SEQ ID NO: 50695 - DNA, 454 bp, Mus musculus
  source 1..454: mol_type = other DNA
aaagtgtacagttagttatggacatgtttctttttcctgtatggaatagagtattttccaaaatgattcaaatgagaaaaaagcttaagatgcatcttgtcatgatttgagagaaatgtttcctcaaaaatttaatttgtggcaaatcatttccttaagatttggaagccaacatttccaccgaaaaccaattcattttggtactattagatgcacctggcctttctgcagcctgggactcccggagcgcaagttctcaagcttgcaagcattctattgattcacacttgcgtccttcaacagaggatgtcccgcccccctggtgcccagagtgccccgcccccggcgcgagagtctgggagggaggagggtgcgggccgactggggcggggcctacctcccacggcgggggcggagcctgagacagacccgcccgctcggttaggacctcgga

SEQ ID NO: 50696 - DNA, 340 bp, Mus musculus
  source 1..340: mol_type = other DNA
ggaggaagattcttcttcgttggggagttgggctacagaccgtaggtcattctagaggaccctgactaatacagtggcagaggcttgtttatatagtgagttttagactagcctgatatacatagctagttctacgttagtcaggactactcttgcagtggaactggaaccaaaacttctaggccagcagaacctagggttgtggggacagggcaaaaattttcctagagggtcactaggagtgatagtgagtggaactagtcccttttcctagttttaaggtcttgaaaggaatttcaagacgtgggttaagcggctcacctgagtctcccaaccggtc

SEQ ID NO: 50697 - DNA, 318 bp, Mus musculus
  source 1..318: mol_type = other DNA
tttctttttaaatttaacttgtaattgctttaagcaaggagctactacattaaacttgtgatttttgaaaaaactatgctggatgaaaaaaaaagcccttttagttagactatttttaaatactacttcccaagttctagaagaacgtggatcctacagagcctctacagttttctcgtcctacgacggagacagctccggaccgaggtgccctccccccacagtccctcagacgcgcccaggggcttcccgggccacactcgacgccgccaagcccgtcctacccgaggtcgcacatgggccgctccggggaccggt

SEQ ID NO: 50698 - DNA, 482 bp, Mus musculus
  source 1..482: mol_type = other DNA
tagctactctcctttaactcttacagatcaataagccctttaattagggctgctggagaatcagctaagttgactgactcagctgtattttggaataataaaacctactttgcaaaattgtttttggcctagactagactgtccagtgatagccatgagaagacagctggacagcagtctgccttcaaggcattagcaaacaaatggctaaagaattgtaagcaagtttactttaaatgcaaccaacatgaggctgtcagcagttcatgatctgggagctgagctcatgcacaggagacagtggcagagagcatccagtccttgtgcccttcttcgggctgcttgcaccaggtcaaagcacattgcaggtttttttccatgggcatgacctgagtcaggactaagagagaattctctgttacatctggcaggtgctcttaaagtggaacaaataattggtcaatgtttatatcaggatgtaa

SEQ ID NO: 50699 - DNA, 506 bp, Mus musculus
  source 1..506: mol_type = other DNA
aattagggctgctggagaatcagctaagttgactgactcagctgtattttggaataataaaacctactttgcaaaattgtttttggcctagactagactgtccagtgatagccatgagaagacagctggacagcagtctgccttcaaggcattagcaaacaaatggctaaagaattgtaagcaagtttactttaaatgcaaccaacatgaggctgtcagcagttcatgatctgggagctgagctcatgcacaggagacagtggcagagagcatccagtccttgtgcccttcttcgggctgcttgcaccaggtcaaagcacattgcaggtttttttccatgggcatgacctgagtcaggactaagagagaattctctgttacatctggcaggtgctcttaaagtggaacaaataattggtcaatgtttatatcaggatgtaagcacattggactttctaactagtttctaacttgtgtgtcagttaagcaactctgccctgagtgac

SEQ ID NO: 50700 - DNA, 371 bp, Mus musculus
  source 1..371: mol_type = other DNA
tactgcctgttccaggaatagcactcacatttttgtttcaaaaagttaatgtttatcttgcaaaaggtttcaggagactaacttattattacctctgagctatacctgactttaattaatctggagaggtcctaaagtggtaacctttagaaagggaaatgtttgaaaagcaatttcattgttttcaatgtctcatttaattccaacacttcaggagtcacatctcctctagtctactcaacttcaggaaatcagttctgcaaacaagcgtgaaggaggattggcaaaggctccacccagcccagagcgccttgtgcgcgcgcaggcgcacttcctgagcctgaaggtcaggggcagccctcatatccgcg

SEQ ID NO: 50701 - DNA, 316 bp, Mus musculus
  source 1..316: mol_type = other DNA
aatgtgtcacacagagatttatttttgagggatccacactcttattataggggcggtttagaagctttctgctcaccagcccatcttggcccttttccctttcaacaaggaagggtggctcttaggttcgagtcccagccctggcatggatgcccactgtactgtccatctggttgtcactgcagcccccgctgccgcaggccagcgcccctcccgggcgtgggatttcagggtcccctgagacacggatagctcctgggctactggcgggggccgggaggagggagcgcagcgggagccgcgggggcagcgctgc

SEQ ID NO: 50702 - DNA, 599 bp, Mus musculus
  source 1..599: mol_type = other DNA
ttaaattccttgcagagtgctttgaacgctttctccatctgagctcagtgtaagctagatctaataaaggggcaaagttcttattggacacacaatacttttacaattagacaatgcgtccagctggggcgacagccatctccgactttggcgtgtagccctggctagcctgggctatgtaggtcaggcgggcctcagactcagtcggctgcctcctggatcccgcaaaaatgggggggccccggcctcaagtgagaacaaaggaggcggcgccccgtgacgcgcaggcccccgggcgggatcaacagccccggagctgtttactctggcggccaaggccaccaccgggtgccacactataaagggcgagctgcccgctccggggagcctcaggcctccggctcgcccaccgagccccgcgacgcccgggcgagcacagctccctcacacggttcccgggagcgccaggcctcggctcctgcgcagcggacgccgcgccgtgcgccacgtgaggcggagcccggcccccggagcggcgcgcgcacccggcgccgaccatcgcgtgactcggagggcgcgcgggggtgagcgcccgggcc

SEQ ID NO: 50703 - DNA, 404 bp, Mus musculus
  source 1..404: mol_type = other DNA
cattgtcctgaataaaacgtttgcttcctctccaatgaagtattttcctgtgaaaagaagcctgaggggttaaaaaattttaaagccaatcctctgtggtgtttgaaatgcaagcctttaatcccagccccgaactctgtgagttcgaggccagcctggtctccaaagtgaattccaggccagccagggctgttactattataagcaacattcttgtctttctaaaataaacacaaggggatctgagactgaggaaccaggcacaggacctgctccggaggtctgagcatcctcgggctacagggctcctcagaccggcgctgcaagcggctctttgagcacagcctgcagccgagcgcagggtccggtcgcggcgcggggtggcgccagacccgcagggcacc

SEQ ID NO: 50704 - DNA, 463 bp, Mus musculus
  source 1..463: mol_type = other DNA
attgcgctggacagtcgcgcccatggaccgcgctcatctagcatgagcggcctggtctggccttgtgcgcctgctgcaaagggcccccccccccccccacgagatcagcggccccccgcgatgggcgggcgcggctgcccagaggcgccccggccacggcgccctacgtcttaggctcagcacgcgcggtggggagcctcgggcgcacttggtaagccgcgccccgcggagctcccgggaatggggacggcctcacgccccactagagcgctcggggcccgaccctccgaccgcagcattgtcggaccgggctgcacagccagcacgagcgtcggctcggaaagcagatgcaggccgttggccgccgcagaccaatgagatggcactttatagtttcttcttctccccgcctcaaagagggaggggaggcaacgggcgcggcgcccagccgtgcagttcctcc

SEQ ID NO: 50705 - DNA, 468 bp, Mus musculus
  source 1..468: mol_type = other DNA
ctcgggcgcacttggtaagccgcgccccgcggagctcccgggaatggggacggcctcacgccccactagagcgctcggggcccgaccctccgaccgcagcattgtcggaccgggctgcacagccagcacgagcgtcggctcggaaagcagatgcaggccgttggccgccgcagaccaatgagatggcactttatagtttcttcttctccccgcctcaaagagggaggggaggcaacgggcgcggcgcccagccgtgcagttcctcccgcgactcgggggccaacagctctgattggccactgtcgctattgtcgactcttctccagccacaggacaagccggcaggagctgcaagcaagcgacgttccggcttgggtttcggctctacagccgaagctggcgggcgcgggctcggcgagcgattcccagacgcctgtaacgcgggcggcggggcgctgaggcggctgc

SEQ ID NO: 50706 - DNA, 306 bp, Mus musculus
  source 1..306: mol_type = other DNA
tgcctggcagccctgcaatccctcaggaaccgaagagcatttctctccttaaataacttgccatttttataggaggacttctggtgagaagcttctagaagggtccgagagagaaaactctcagacagttcctggtagtcccagctttcacgtaaactgcttctgtccaggaaattaacttagggaaaaaaagtgttaggagctatagattcaaaggcactttacctctagaggcaaaatccttacatgttttacagtgaagacaactatgaaaggagtgccaactggggccccttactacattgg

SEQ ID NO: 50707 - DNA, 141 bp, Mus musculus
  source 1..141: mol_type = other DNA
tttctttttaaaagaagaatcaggatttatttatttatttatctatttaaagcagagtattacaccaccttgtggaaagaggctttcagaaatgaaagtaccgccaggcttggtggtgcacgcctctgacgtcagctctat

SEQ ID NO: 50708 - DNA, 362 bp, Mus musculus
  source 1..362: mol_type = other DNA
gatgagatctgatgccctcttctggtgtgtctgaagacagctacagtgtactcagataacatcttagtgaacttgaatacaattagaatggttgatttgaagcaaactgagtatcacacacacacacacacagagagagagagagagagttgaaagtagaaaaaaatcttatcttctttcatgactactgtgtcatgatatattatctgaaaatttagcatatatggtcatataggaatatatgtatgcatgtatacatataagcatgcaataagatgtaattaaattacaatttaacctttgcgccagcgctgacgccacgcccttggagcgaggccttgggacttcctgtcccccttcga

SEQ ID NO: 50709 - DNA, 241 bp, Mus musculus
  source 1..241: mol_type = other DNA
gatgttccttgaaagtcatcagacatcttagatgaccgtctcaggttcaaatccttccgtgttggaacacaggctccattttcctcaactctaggagaataggaatgtgtatatacactgctcagtgaaggtggagtgccaaaggagtatttatttctttactattactctgggcagatatttgcagagcagcacagtgatgattccccaaacatggtatgcattccaaatggaacacaag

SEQ ID NO: 50710 - DNA, 321 bp, Mus musculus
  source 1..321: mol_type = other DNA
agggcagtggctctgttctggtataacctgtgtgtgccaacgtgctcctgttgcaggaacactgacccaggaagggccctgccctggtgaggtggcagcactacctgtgagctcaggcatcaagatgttgacttcctaacctcgagaggctgtggaaggcagctttgcagaagcaaattggatctgtgatgtccacagaaattccattacggtgagagttttgttgagatttcataatgggaaaaagtctggctcattttcattgagaaggttaaacaaataggaaggtttatttatttatttatttattttagacatccc

SEQ ID NO: 50711 - DNA, 322 bp, Mus musculus
  source 1..322: mol_type = other DNA
tcttcaccataaattttcatacatttcaaattttaactctactatctttcaagacagagtctgtcactgaaccaggtgcccatggatacacccagggcagtggctctgttctggtataacctgtgtgtgccaacgtgctcctgttgcaggaacactgacccaggaagggccctgccctggtgaggtggcagcactacctgtgagctcaggcatcaagatgttgacttcctaacctcgagaggctgtggaaggcagctttgcagaagcaaattggatctgtgatgtccacagaaattccattacggtgagagttttgttgaga

SEQ ID NO: 50712 - DNA, 482 bp, Mus musculus
  source 1..482: mol_type = other DNA
tatttgcaatttgatgctacacatttattaaatatattaactttcctatgacttatcaatttatttttgcttaataaaatttattattgtgattaatagatttatttacacaagaatagagtcaaaattaatagatgttaaatgtcctttttttctgttttgaagacatagaagagaagacatgttctgatcttagatctgtcactgtatagattaggccaagccgctctgggcggtgggtaccaggctctgggagtccaacggtccgcggggcagaaccctggcagggcagaaccctggcagggcgagcacgaggctggccggacaccactccactcggcccacacgcagcgcggagcggttcccgagctgatgcgcaaggcttgggcgcccccagcaccgccccttcctccttccgtccagtgcggaggacgcgggaggacgcagctccgccggaagccgctgtgcgccagcgacccgcc

SEQ ID NO: 50713 - DNA, 352 bp, Mus musculus
  source 1..352: mol_type = other DNA
ggcattccaacactgttagaaaaacaccatcaggattcttttgtgttagggctgtcctggaactcactctgtagaccaggctggcctcgaactcagtcgttttcatttctcaattttgatactttatggaagaaaaaagaaaagatagtttcctgttttaagatataaagaaaccatttccaaacactgccttggacaaatatacttttggcagtcactctgtgtcaatggaatttaagctttcatggcctagctggggtgggaaccacctcacttcacccagctgtgctcacccggtgctcagaacaggcctggacaagtcacctcccctagagttctggggacctttgcc

SEQ ID NO: 50714 - DNA, 281 bp, Mus musculus
  source 1..281: mol_type = other DNA
cttttagtatactttaatctcagcaaagctattaaaagtaaataatcatgtatgtgaagttgaaaagaattatgtttcttttaatctggaaaccatgaccttttgttcaagatcatctttataatatgttgtgaatacaaaataagaggggtaaatagctagtctactaaacaccgtgttacagactgtgccatcacatactccttgagtcgctgtccaggcagagctagtggctgcccctaggtctgagtttattacatccttggtgggaaaggggaaat

SEQ ID NO: 50715 - DNA, 271 bp, Mus musculus
  source 1..271: mol_type = other DNA
aagtaagctgtacaattgatacagtattggcactagtgctagaactcaatttctattatctacctagttcattatttaataagacgtgatcttaggtggcatctccgacatttctctagacactagctgactggagccaggcgtatgggccggaaagcccgggcgccggagagtcccactgcgcaggtgcgccgggaggagggcgagccagctctgctggccgcaagcctgtttccgggggccagcgcgacgcagagctgacgtcatcgct

SEQ ID NO: 50716 - DNA, 447 bp, Mus musculus
  source 1..447: mol_type = other DNA
tgcagaaagtttgtaatcaatcacttatttaggtactcctggaagtgactgtagagcaccaccaagctgtatattcattgtggtactttaatgcaaagactatgagatttgtggtaacgaccaataactaaattacacaaaatgattgggaatatttttaccttggtaaacaagttttttggttttgtcttgtgttgaaagaaacaggaaataatagtttcagttattaaatgataattctagatcttttgccttctcggagcagtaagcatacggatactagctgatatttcaaaaatagtttttaaatcttggaccttttccgcccaggaagctcctccggcccgccagggcgtggcctagaagcgccgccctcaccccgcctttgcgcgactaggggcggggcttccggtctcctttccgagagcttccggaagtgagccggct

SEQ ID NO: 50717 - DNA, 369 bp, Mus musculus
  source 1..369: mol_type = other DNA
tgagctatactataacactctatctcaaggataaaagaatgttttaaaaagttttacttattattatatctaagtacccaccacgtggttgaagagctcagtgaaagaatttaatgataatgatacatagctttaaaaaacgtccaatttgctttttgtttgttatagccttggctgtcctggaactcactctgtagaccaggctggtctcgaactcagagtttggtatggtcttttgcagcctatcacaaacctcagtacaaaacaagggcttgtttaacacggcctatttgtgttatattgctagaaattcctattataaatgagctctgtgtatagccaggctcccggaggcctaggggtgccgtg

SEQ ID NO: 50718 - DNA, 363 bp, Mus musculus
  source 1..363: mol_type = other DNA
aatgtcagaaatataacttcttctctcgcccgagggtatcctaacctcagcgtgggagaggagacgtctgggcttcagggtgtcactacacttaagtgtctccctgcagagtccggcgccgcctcctgcgctgtgcaaagagcctgactggcggcaggaagcgggcgggcggccgcggctcctcgcgaggccgatttcctccgggacggccctgggcgagccacttcgggagagcgcgatctctcccccagcctgttcgcggtcctccagcgctctgaaggcagagcgcgggcctagggcggagcacactcagccccggggcggtcccctaaccgccgcgccccggccccggctcctcgcaag

SEQ ID NO: 50719 - DNA, 456 bp, Mus musculus
  source 1..456: mol_type = other DNA
taaccaccaaccataaagttatttccttgttgcttcatagctgtaattctgctactgttacgaactataaatatcagcgacccacaggctgttctatcaattttagcctaatttgattattatgattatatttgaaatattatgattcgcataatatcatttggcttgaggatgtgtctaacccttgcggtgtaaacttacttaaactactatgaaggctgttcagggttctcaaacatgaactttataaatgacaatgtcgcctggtagtgtcacgcaaaataaacatgtaactgtagactgaagccacccttcatttaaaagcgtcactttcctgctctgtaaagcactgggatatgatctcttttccaggttccggtgatgtccccggggatggaatgctcccgcagcgcgggtgagaaccgggcagacccgccccctcgatggcgctgcgcg

SEQ ID NO: 50720 - DNA, 355 bp, Mus musculus
  source 1..355: mol_type = other DNA
acattgactgagtcccatcagtcttgctcaggaactggacagctatggacatctgttcctcacggtaccagacaggccattctcttcaaagctgtcagtgcgtagccgaggctgtcccacctactctgtctcctgagtaagaatctatgaggagttcccaatctattgattaaagtgctcagacctagcattactttagttgctgagatactcacctaatgaatattagaccctgcgcaagtagagggctggtttctttaataagcaaagtctcctgctcagccaggcaggttcaggcagcatcaggcgcggcccatgtgagatgcctccttccccggaccggagcgtcagagga

SEQ ID NO: 50721 - DNA, 396 bp, Mus musculus
  source 1..396: mol_type = other DNA
tcaaataagtaaaagcatttcaaatgttatgaaggcctctgctgcaggcctgtaatcccagggcttgggcattttagatcatcctggttttaattgaaatagcattattacacatgcctgtgtatgcatatctatctgtctgcccatccatccatccatccatccatccatccatccatccatctatggagaaactcatcccttggacaggttaactttcctaaaggtcttcctgtcttctaaaagactcctaaggttctttcagatacagagcaggtggcctggccgcgccagccggttgccctggagaccgctcggcgagtgggcaggcggtgccgagcccccggctggggaagagctgggagtggctgcggcggctggtggtggccgcggcgg

SEQ ID NO: 50722 - DNA, 281 bp, Mus musculus
  source 1..281: mol_type = other DNA
ctgaatatatggagctgtttaaactttaaatctcttctctaattgttaaatgcaattaaacttctgtataagacagaggagcccacacagtggaacttggtttggctctcactaacactgttctgctgagaatttaatttaatgacaatagtagcctaccctctcaggtgtgggagacacatgttagcttggcccccacgctgcctgcctcatctgtgatggagaatccagatggcccacctatgggattcacctcttggtgggctgccacagcgctgcct

SEQ ID NO: 50723 - DNA, 404 bp, Mus musculus
  source 1..404: mol_type = other DNA
acaaaggttggtactgagtacccagtgcccctagtgcagagacattaccataattcaaatattaaattgcatcactgaataaaatgaaatagttttgttagggtagtcattcatatttttctctgaattttctctctaaataacttcaaactagaatagatagggtcagccatgtcaaaactggtttgacctagtgcttcaaaaccatacataaaggattgggaatgctgtgtgaatggcattggataggatgaggcttcagatggccactagaatctcaaggtggaggtcactgtgacagtcttaagaagacaagggcttttcacctatgtttgctgagcaaacccagggccgcggcgctgccaggctgtgcgcaccagtagcggggccctttcggctgggct

SEQ ID NO: 50724 - DNA, 207 bp, Mus musculus
  source 1..207: mol_type = other DNA
actttgaaaccaaccttggctttcagtttgagactcagtcctgacaacccaaaggcgcatcaggctttgctgccgctactgctgctgctgctgcaagaggccctggcaggctctcctgctgcctgggaaagttttgatgagggctttgttaaatcccgcgctggacccgcccgagcagccttggcagtggctgcgagccccgcgcgc

SEQ ID NO: 50725 - DNA, 315 bp, Mus musculus
  source 1..315: mol_type = other DNA
tgttacagaaatctgtcattcacagacactaagctaattagaaatcacaactgtcaaagaagcttgtgtgcataagcaaataacccactatgtagttttagatatggagtctaattcctagaccatagttcacattcaagtgctcagatgtgtgtgtgtagcgtactgacacatttgtaggtgatatatttgtgcatagctaagagtatcatatgtgtgcagttaggttatataaataaaatcagttagtgttgagaaaattatcaactgcgcgtaaaatctaatggcagctgtaaagtgcaccaatgcagtgcg

SEQ ID NO: 50726 - DNA, 531 bp, Mus musculus
  source 1..531: mol_type = other DNA
ctgcctcttctgcatccttaggaaggggaggggctgaagggggacactgagagcccgaacttcaaaaccatactcctgtatttggggatcagggttcaatccttgccaagcccccctgtctacgggtgagagcaaggcaggctgggctacgcgcccaagcccgggttctccgaagaggggcgggagccggcgccgccaacagctccggagccccggccggtgcccctcagctcctcttctgggaagccgcgactccagaagcgggggcaacgaccggacgccccgcccgggccagcggcggaccctccccgcagggtcgcgcgaggccgccgggcgggcgcgaggaggggcggcgggagggcgcgcggggcggggcggggcagaagccccgggctgcggctcggaactcgcgccacggccccaccccgcccgactccccgcgactcgtagacgcccggccgcgcgcagaaggcccacattgggcgcccgaagccttgggcggctcgcatgccactcgctgcttcagctgac

SEQ ID NO: 50727 - DNA, 359 bp, Mus musculus
  source 1..359: mol_type = other DNA
tccctgggcctcaggtcgccgcggtctccccctctgggcgagccagacagcgggtaaccgccgcctccgctggggcatcccggctccataggcggcgcgcggcagacacctgcttctcactggccgccgccgctgcccctcaccccgcagtccccgcgacaattggccccgggccgccgcccgtcatcatttaagtttatcacaaataaataaatatcactacagtccggtcctggcctctctacacagggcgctggactgttaaaactgctctgagtgaagtttccgctcagtcagctgaagcagcgagtggcatgcgagccgcccaaggcttcgggcgcccaatgtgggccttctgc

SEQ ID NO: 50728 - DNA, 518 bp, Mus musculus
  source 1..518: mol_type = other DNA
ttttttctttcaaggaaggtttatttaaaagcaccagttttagtttttacttctaataaaagatgaaaggttatttactgtagtttccgatccatattgtatagtatactatgtattaaatgcattgcacctgttaatacagactgcattgcattgtgtagctggatgcttcaaacaagaaaccagtctgctttcttctagggtactagcctattagcaagttaattaaacttaattctgtttttctgaacagtttcttacagtctcctttaagacagctctgactttaaaatcattactaagcttttgtcagagcagatttgttgacatttttctcacattcaaaaaataaatttgaaagattgcacaaataagctatgtaattccttatttcctgctaatatgcaaaaatgtatttatgataattacacacgtactgtggcataaataaagaaggtggagccagctgctcttaaactgtttctttgcaagcagtaatgctatagagaatatacctt

SEQ ID NO: 50729 - DNA, 616 bp, Mus musculus
  source 1..616: mol_type = other DNA
gcagaccacagtgctcatggtgcttctcattgagagagatactgtccttcacagctactaagacactcacatgttaaaattctgaatattggtttactaagtaggtattgactaacaaaagcccagtttaactaaaattgagatcaatgtttgcttataggaaatacattgctgtgcacaaagtaactttaaattgaatgaaaaaccaaaactcaaacattcttgtggctttttaaattttttatcacattttatctcatagacatttgattcagagtttaaagatagtgaattagtttactagggcattgagataacaaacaaagagaaaattcaactcagttttcaatatggaaattttattctgtagaatgaataatgaagggtagacaaaatatagaatatataacatatacattaagttaagtgtatataattgacacaaacttaatgtatttacaatgagtaaaagtgaaatttgcgcatgttctcactatccattctggatgattctaatatttgataatttaagaaaatttaacttgtagtctcaaattagttgaactgctttctatgatacatacatgacatgtagatgatcaacaaataacaatta

SEQ ID NO: 50730 - DNA, 405 bp, Mus musculus
  source 1..405: mol_type = other DNA
actttgtagaccaggctggcctcgcccggctataatacatttttaaacaatgtttgagtcttgttaactgtttgaaaagtgagttggacactgactaaccactgatttcattctaagctgtagaatgtacagcacatgagaaaagtgaaactaaaaaacatcattgaactataatattgaaactatctgtaaataattaaaataatgaacccagtggaaaaaattatgcactgaaaaatgttgaatattccaaaatataaaattaatagaagggaagaacttttttcaaaagaaaatactttccatccttcaagagcagtgccccgggcagtctgatcagcctgtccttgtttctagaactatgtaaaccaaatcaggatgaacgacacatggtttaatagttaa

SEQ ID NO: 50731 - DNA, 271 bp, Mus musculus
  source 1..271: mol_type = other DNA
agatcttcaggctgtacatcatggggcatggccaatacagctctgccaaagagacgaactttggtcaactcttgagcgctgagcaattcttaaagaaaagatgatgtcctagtttggtttctgttgccgctgccctgacaaaaagtaacccaggttacagtctgttactgtggcaggaactcttcttcgtgtcaatagtcaatatacgagttgcccatctctaaccacatgttgtacttgttaagaaaacattacacttacagctgcagtg

SEQ ID NO: 50732 - DNA, 596 bp, Mus musculus
  source 1..596: mol_type = other DNA
actagcactttatttctgtataagtatagttctgctagacttttgtaacagttttaagaaaaaataggttacaattgtttgttctcataatatctagtatttcacttaacagaattcttatcaccgtggaattactaattagattgtatactttcttgggcacagagtcgattcagtcttgatcaccatagtatccagtgtattcagcacagttcagagtcttatactaaagaggtctcacatgagtttgaaagaatgaatgcataaatagatatacacaaatgaataaaattgtaaggggaattattattttatttatttattaaagggccatatgtatcaactaatagtaggcctttcaaatatgcctttgatgtgtatgtcacccatccacaataaagtatttgcatcaagacaacacattattgaggactctttggactaaataaataccattcaagttaaatattggtgcactaaaagttgaaagaaaataataacacatatatttcaaattacacacacacacataaatatatatacatatatgtatgcataatacaggtatatgtatctacatatatctatctctttct

SEQ ID NO: 50733 - DNA, 350 bp, Mus musculus
  source 1..350: mol_type = other DNA
ttaggtagaggaggctctaactttgaatgctcggataaccatatggataaagcagagaatttcgtgtgatgattttttttttccttttaaagaccccttaactcagatttgaagggggcagaagaaaatgtgcggaaagtttcctaaggcaaattcccctcaccatcctagggctgtgcaggctctagggtacttcaggactgtgtggcgcctagggccggcccatgttcctcccagactgctttcaggtggttctgggagttgtagttctgccacctagcagctagacaggggtcagacattccggaactactactcccaggaggcgttgcgcggcgcagaaattccgg

SEQ ID NO: 50734 - DNA, 201 bp, Mus musculus
  source 1..201: mol_type = other DNA
cagttctgaatcatggctacagctgagaagctcattctctgcagaactcttcgcaagagataacacgtgttccgactcgtagaaccggaatttctgcgccgcgcaacgcctcctgggagtagtagttccggaatgtctgacccctgtctagctgctaggtggcagaactacaactcccagaaccacctgaaagcagtctgg

SEQ ID NO: 50735 - DNA, 700 bp, Mus musculus
  source 1..700: mol_type = other DNA
agggaagggtttctcttcatgaatcctaactaatctccctgttttgtttgtgataagaacataggaagattagaaacttcagattgttaaatttagaaaaatgttaactgtcaaagtgaatgcttttgtggtttctcttaaagcacttcaccataataaaacactaaatatgtacgtagaattaatgagatcttaatctgttatgtatggattgacttcaataaaaccggaaatgtttaagttgtcgttttttcttctgtttctgcttaaaaccaaaccaaaacctagatacgtaggcccatagttcttacagatttgtgctgcaatacaaacccagaggggactctcttgggcaatttcattgcaaatgtgcagaccgggcttggggtccacagcgggcctcaagggaaggcgggcgactcgtggggtggcacctctgaaggcggccaaggtgcggatcgaaccccaacgcctgttgccggcgctggaggaccgcaggcgaccggcggaactctggcggcgcgcgagcgccggggtccgatcccgcaccccggcggcaccgcgagggccccggcgcaggtgcgaggtggcccggccggagcgcggcgggggaggggcctcgtgggcaggcggcgcacgtgcgggcggcgggatcccggcgccgggggcggggcacccggaagcgcgcgccgacctgcgg

SEQ ID NO: 50736 - DNA, 367 bp, Mus musculus
  source 1..367: mol_type = other DNA
ggtgtgtgccacccacactaggttgacaggagggtgtgggacccttcctttactaaattaacagagagaactgttagaaattagggcaagtcttgatttctcatttaaaacatttctcttttggaaaaattaaaattggtagatgagactcaggactctgccaggaaattgttctgaatgaatcgagacgtcaccttattccatttagggtactcaggataggatctatgctagcgttaagttttaacatagttaattttcacgtggggttaaaataatattgcagtaggtgttttacattatttgagcaaatgtaagatctttccattttcagctctgcaggctgaccggccccctggaaagaggg

SEQ ID NO: 50737 - DNA, 382 bp, Mus musculus
  source 1..382: mol_type = other DNA
aagacatcttatttatgcaagaattatttgtttttcttttagcacaagggtaagtgaaaattaggttgtggcagaatgtattactagataaggtaagtgttcattccacaagcattttgaaagaaggcacaattttcatgaatcaatagttcaaaaatttaaagcaaaagatctatagttatttttatgttctttttcaaattcaaaaagaaaaattgaagagcatggctctcaggaggcagaggcaggcagatctccttgagttcgaggcactgggaaagtgtctcagtgggtagcaccaagcctgatgatcggagtgcgggcacgtgcatatgggcatgcgcagacgcacacgcacacgcatacggaggccgaggaggat

SEQ ID NO: 50738 - DNA, 348 bp, Mus musculus
  source 1..348: mol_type = other DNA
cttttggctgagaagccaagccaggccctgaggctccgggagacgcggggaaatctgccgccgcgctgccgccgccgccgctcctccacacggacactcggctcccgcccgcagctgccgccagccagacccgccgccgcgctgtgacctcaccccgcccctcaacgcgccggcgcggccgccgcgtcgcgcgcaggcgcagtgctccgcgccgccaggattccccgccccccgctctccaggggccgggcctacggcccgctagcaggctccggcggcaaaatccggatctatagggttttgtaaaacggatttgttttaaattcaaggttagcgtcacttccgacg

SEQ ID NO: 50739 - DNA, 227 bp, Mus musculus
  source 1..227: mol_type = other DNA
cccagaggctctgtcactgagagaggggaagtcttcagctgccgtcggaagtgacgctaaccttgaatttaaaacaaatccgttttacaaaaccctatagatccggattttgccgccggagcctgctagcgggccgtaggcccggcccctggagagcggggggcggggaatcctggcggcgcggagcactgcgcctgcgcgcgacgcggcggccgcgccggcgcgtt

SEQ ID NO: 50740 - DNA, 382 bp, Mus musculus
  source 1..382: mol_type = other DNA
ttgtgaaaagctcataaatctttcaccaccactaggtggagagctccaaaggcactttagaggggtgtctagtagcctaaatttaaggtgcaggggactgcagaacctttctgaaaatccaaagatagtgcactgagggaagtcacataggactgtttctacgcttgcattgaaagctgccatgcgaggaagtttcttaaaaacctctttttggtcattgggccgcccgggaaggctggccacggtggcagcctccccagcaccggattggccggccggttggtcggggcgggagcgaggcgcatccaggctaggctgtgcgcgtgccgagcggcggccgcgggaggggcggttgaggccgtgctgccgccgggtctccggc

SEQ ID NO: 50741 - DNA, 355 bp, Mus musculus
  source 1..355: mol_type = other DNA
ctccatcaactttaggagcagccagtgctggttacttggcaagacacctgttgatccgtgtgtagctttccccttaacaattgaaggtcaggggtttccaaggaacttatcaagggtaagacattcattgtaaagtccttaacatgatttatgaagttatgcacaggcaattccctctgtagaaatgctgcgatattgaaatattcccataaggtcactatctagtatgtatacagaacctccatttggccctttgggtgagaactgcagagccccacgccagtaccgcctctgggtcgcctcggaggagctcgccggatgtacgcaaaggcgtgggggcggagctctggtaacc

SEQ ID NO: 50742 - DNA, 376 bp, Mus musculus
  source 1..376: mol_type = other DNA
aatatgaattatctttttaataaggagatgttagattgcaagatcatcaggtctcataaagtttgtgatggcttttcctctcaaagctacaaaggtcttcagaaatttcaagtttattaaatttcactaaacgttgggaacttgcataaacaccctcaggcttagcaggtgggggtcaaggtcggtcttagaatcctgaaaattctttcagactctgaaagaaaatattgctgagttactggtctctcaaacttccggaagcagtcttctctatattttgtaattgtacatatttacatacttgcacatatggcaaggggagtctgctcgagcagtgcgagagtcttgctggaagccagctagagtgcactttcgt

SEQ ID NO: 50743 - DNA, 422 bp, Mus musculus
  source 1..422: mol_type = other DNA
cagcaaactgtctgctgtacagacaaacactattgtgttagggaccatgggaccatagttagcatcattcttttgctatgataaaagactcagacaaaagcagcctaaggaagagtgagtttattttctcagaggggatgccatccactgtgacagggaaggcatggccccagtgacagacttactctaaatgtgaatatatacacctatgggagacatttacattcaatctccacattgtcttgtcagataaagttggtaacattgttttttttttttttttaattgtgaatttctaaaaacttgtaaagcaaacacatgaacagttggacagtttaaatgatagcacctattaattctaattgtcccataatttataggttttaatcaatcaactgtggactgatattcagcagaaaatc

SEQ ID NO: 50744 - DNA, 376 bp, Mus musculus
  source 1..376: mol_type = other DNA
gttctactaatcctatagtgatgataaagtagcttcaaaacttttatttctgagttcgaggccagcctggtctacagagtagctcgtcatatattttatatacaagtcctttgtccaatacatacccttatttactttttaaaaaacacaggtaagctttagaaaatttcgatgttgatgtatctggaagctgccttctgcagccaagaccacttgtttttaattggcaaataaggccggtttggaaagttgggcaagtacccaaatactccagtagcttcttccccagggcacacggacgactctgtggcaacacctcagtttaggcaaaaaccttgggggatgctgcgcatgcgcctaatagcctgctgtttgc

SEQ ID NO: 50745 - DNA, 175 bp, Mus musculus
  source 1..175: mol_type = other DNA
gtgggttagacatgcacagctccagcctgcagggaaagatttaaacttagtaatctgcaacctcaccacgaagggcttttgcacttctgtgatggcaacagagtcagtcactcgatgacgaataactgcatggcgggaacgaaaagctgaaaatttaaaggttttgtttactcct

SEQ ID NO: 50746 - DNA, 328 bp, Mus musculus
  source 1..328: mol_type = other DNA
aatgtgtacccgaactaacagtttcagatcacctgaaaactaaagaaatcctttcttagcacagacttgctgaatcagaagttggaggtggagcccatccatctacgttgtaacaatttgtccaaagaagttcccgacaatgggtttgaaaattactacccctttcctaggatgctgaaaggggaggtaagacctggcaaacccttccctgccagccaagtgtctgggaaggctgtgggtggaccggcacccccgcgcgtgggaattgggggggacttgtggtccctcccccccccccccatcccctcttcgagcggtaatgggaggc

SEQ ID NO: 50747 - DNA, 278 bp, Mus musculus
  source 1..278: mol_type = other DNA
ggccagcctggttagggctatacagagaaaccctgtctattacttgcgttaaatacgtctagtaagagtaaaaatttgtacagcaggcactgttctaagaagtctttacccccaagcacactaaattggataatatgagctatatccaagctatatagttttccttgactactaatcgtgacgaatgtcacatttgctgatacttttcaaaatatcaggagcctcagctaacgggccgtgactccgccccggggcgggccccacacctccggcccgcc

SEQ ID NO: 50748 - DNA, 267 bp, Mus musculus
  source 1..267: mol_type = other DNA
atctgggtcctcatttctgggaaacaacccaaactgccagtttacagcctgtcatggagtcaaccgatcttctgcctacagtagagactagggaagagtatggaaaacacagcatatgttgactctaaagtttatgtgcctgctatatgcagatgctttaaaaagactcccatgagccatttgatctgcctgtcagagagataccgtccctttgcgagactcgtttccccctttcccagcaggcgctgcggcagcgagctttctgtc

SEQ ID NO: 50749 - DNA, 404 bp, Mus musculus
  source 1..404: mol_type = other DNA
aactgtaatctaagtttatactaactagtaacattacacagaatttttctgggaagttagactctcagatctatgacatgtaattaaattaaggatcttcggatgaacagacaatgctcattgggcgcagagacatctgggttccagaagaagcaaaggcctggctacgccttgattttaatccattttgggattgttagggtaataatagaagatgctcccagcattatgtgtgattaatctcaccatggcattttcaagtagaaatatttattctgcattaaagactgaggaagggtatacacactattattattattattattattattattattattattattattatattggagaactttccagaaattcattgtggttaggaagttccttttgcttca

SEQ ID NO: 50750 - DNA, 509 bp, Mus musculus
  source 1..509: mol_type = other DNA
aatattttattttaaaaaaatgtatggatttttgtatatatatcatatatatgtcatgtacatggtatatgtatatgtatatatatatacatatatatatgttaatatgtgtatatgtatgaggtggtctttcatcaaaacaaggtcacagtagtgacattcaatgtgacatctcaacaggactccccttcagagtcacagagaaggactacataccttatgagaaataagatgtcatgagaaattggcaaagtttttttttgtcaattccctctctatatagctaatgtattaaaaaatcaacaatattgctcaagtcagaagccagatgtctttctccagagtctaagccctttaattcaggttcactaattatccttagtttctattcattagctttcttgctttttaaaaacttaaggtagaaacaattttctgtccttgtttttgacacctcatgtggtcacaccctttgaggacacaagatctgactgcaaagagcacatacc

SEQ ID NO: 50751 - DNA, 549 bp, Mus musculus
  source 1..549: mol_type = other DNA
aggtgaatatctcacctatatgttgtgatcttgtaaatatatatatatatatatatatatatatatatatatatatatacacacatatatattatatgtacatatacacacaaattttgaatctttactttttagtaatggctaaaactactggataacctaaaaagcagaattcaattctctattgaatatcccatatagtcatcataatgatagtgacaacagtgatgaacagatgtcagctaccagtctctgttgatgtttgacaacaaataattaacagagaaactgataagttaccatatattcttttgtaagtccaaagtagcatacagcgatgaactccgtaaagcatttcatttatgtgcagctcactaaacacaccctggtttggaaatttgggaaatgcttgtccaagttcatttgtacagattcatcagtgtatacaacgatttaccctttaaaaattactgccttaaaatggaatctgtgtcttaatcttttaatactgtgagagaatgaaggagttatgctttggcttctttcttt

SEQ ID NO: 50752 - DNA, 438 bp, Mus musculus
  source 1..438: mol_type = other DNA
cagaagctgttagcttctgtagtccacactctcacctgtgcagactagcctactgggccgggcagacacctgtcctctggcctcccgggatggtggccagatgtctggagcccgaaaatggcgctgcctcagaagctctgtggctctcaccttttccagaagctgttagcttctcccccttcagagtcacagagaacataccttatgagaaataccatattgtgagaaattgtaaagtattttttttttttgtcaattccttctctatatagctaatatattaaaaatcaacaatattgctcaagtgaagtccagagtctaagctctttaattcaggttcactaattatccttagtcactagctttcttgctttttaaaaactagagctggaaataattttctgtcctttgactgcaaagggcacacatagccagaca

SEQ ID NO: 50753 - DNA, 388 bp, Mus musculus
  source 1..388: mol_type = other DNA
ttctttaagtgagttattaaagtccttcttgatgtccgtggttagagtactctctgcaggcaagctctcctcttgcagggaaggtggacagatatctggcatttcgacctgcctcctggcagaagatgaggcccaaaatgtgactctctcctgtgcagactagtgctgtggcaaagccctccagggcaggctggacacctctcctctggcagggaaggagcccggctgcccagaagcttttagcttctgcagtccacactctcacctgcacagactagtctaggcagaatctcagaacctgtatcttaatgtcttaatactgtgagaaaacgaatgagttttgttttgacttctttgtgcaggcttagtcagccaactgaaggcagac

SEQ ID NO: 50754 - DNA, 374 bp, Mus musculus
  source 1..374: mol_type = other DNA
cacacacacacacacacagagagagagagagagagagagagctcaccatttctagagaagctgggatgtccaactgcagtctcaggagacagcagcctacttagtcatgtttttggaactataaatagatgcatactgtctctgtctctagggaacccagtcagatggagcaacctgaggactttccccttctcaaactgtagtgtgagaatccacaggagggggaaggtcccgccccatggctcggtaagtttcaaaacttctctccatgtactgagaggtttggtttggagcaaacctgaagtactgggaagggaagggggaaattgtcccttttcacattcaggctggaaaacatattaatcctggtgttt

SEQ ID NO: 50755 - DNA, 591 bp, Mus musculus
  source 1..591: mol_type = other DNA
ctaacatgtcacagtttactatgttcctctgaaacctaagcaagttgggaaacttcctatgaaacttggaaggaaacgtggcatgctgtttagccaccaagctgtcatcttttcaaaggttaacccagtctacctatttaaacctagccgtgcactccaaggcggcactgatcagtgggccttgggactggcccaggagcccaaggcaagaggcagcacccggccgcgcgactcgcccctccaccttctacaccccgtccacgctggggaccgggacttgggcaagggcagagcaagccagaccctccccgcttaccttgaggaccggggtcaggtactcggctggggctggagcagcgatagggcacggagccccggacgtgcccgactggcatcgaacctcgcagcggcaccggcccggccgggggggaggggcggcgacacgcggaggcccggcccagctgtcacctggccgccaccgcagagggcccaagccggctgagcgagaggcgggtgcgcgcgcagcccccggccttctcaaaaggaggcccgcgggggcgggaccggccggcctctgctccctccggcccg

SEQ ID NO: 50756 - DNA, 345 bp, Mus musculus
  source 1..345: mol_type = other DNA
aactgactaaaagcagtttattcgtattaactttggtccacaaggaatttcactgggaacgattcttttacagaaggctcatcttgggtcagtgagcctaactggtcggtctttcacgacagatggtcacctgtcagggaaaccctaataggaatcgcgggcggctcccaagccccttcagcccgcgagggcgcggttacctcagtcgctcctgccttccagggctggaagctagggaagagcagcctgagcggccattgcgcaggcgcgctcattccagcgcttccggggggcgggccggagggagcagaggccggccggtcccgcccccgcgggcctcctttt

SEQ ID NO: 50757 - DNA, 404 bp, Mus musculus
  source 1..404: mol_type = other DNA
gtctttcacgacagatggtcacctgtcagggaaaccctaataggaatcgcgggcggctcccaagccccttcagcccgcgagggcgcggttacctcagtcgctcctgccttccagggctggaagctagggaagagcagcctgagcggccattgcgcaggcgcgctcattccagcgcttccggggggcgggccggagggagcagaggccggccggtcccgcccccgcgggcctccttttgagaaggccgggggctgcgcgcgcacccgcctctcgctcagccggcttgggccctctgcggtggcggccaggtgacagctgggccgggcctccgcgtgtcgccgcccctcccccccggccgggccggtgccgctgcgaggttcgatgccagtcgggcacgtccgggg

SEQ ID NO: 50758 - DNA, 527 bp, Mus musculus
  source 1..527: mol_type = other DNA
tggaagggtaccattagcctctgagggaaagatttctcaatttcattcaatgagttaaactgcaccatttggaattaacgtgggctgcgtgcccacagcccctcaccacaaatgaaagtttcctctaattgagtgctcattttgcttagaactttaatatttaggataagtattccgtaggcatctacagactgaagaaggaggcccttccctcttctgttgatgatccataacgtcagataagtcttcattggtttcatgacaaggaacattctcatcttactgtgccattacactgatgaagtatcataatcacaaactataaaaaggggaaatatatgcttaccataggtactttttgtatgaatttcctggatttgatcagaatctaaacctaaagactgtaacaatttagatctttttttttttaagtttaattgttcactttgagaaaaacctcaaggttatgcacagctgctttgcagtctcctgatttgatttaaattaattaatttattttggcctaa

SEQ ID NO: 50759 - DNA, 313 bp, Mus musculus
  source 1..313: mol_type = other DNA
cagcctggtaccatgccaggtttctactctagtacagaaacagaaatgtatcgtttctgtaaagctttcatcaaggaaatatcctgtgactcctgattagcagaaagccttaggacctctaaataatataacaaatcgtaaaataaagttttccttttttttttccttgtatgaagctccttacacacacacacacactattgttctgttctccgtgtttatcttttgctgtacagaaccacaggattaaataaatctaaaatgaaaaaaatatagagtgattctttcacatttttgctatattactctaaaa

SEQ ID NO: 50760 - DNA, 125 bp, Mus musculus
  source 1..125: mol_type = other DNA
ctattgttgcaatggagtgcaacataaaatattatttgaatgtgatttctaagaatttcacactccatatctttgccacctgggtgccgattattttcagataacagttcatcatcaaaagcaat

SEQ ID NO: 50761 - DNA, 443 bp, Mus musculus
  source 1..443: mol_type = other DNA
gtccttagaagattccttcactgaggaactcttgatgggtttcccacacagtgggaacagcatcccggcgatgggcacgtggtagtcccacagcctgcgccttttcccttaattctatttttaatataagaaaggcattcaaatcttataatttccatgtaaatgcttagttgagatactcttaactttcattccattaaaactttataagtagtttaccagttttaaactttcaaatggatttacactgttaacttgtggaaataattcccttcaaagctctctctgtctgtgacaactgcaggagaccgaggagttcagtaaccataaattctgcattcaaaatatctatacataatacttactatttttctaaataagcacagctttaaatttttcaatgcctttaatacacagaaaatggatgctgtttctataagcca

SEQ ID NO: 50762 - DNA, 261 bp, Mus musculus
  source 1..261: mol_type = other DNA
tgcctaggctctgtgtttagggagtctttgatagccctaaccaacagctcaaaatttaaaccaatatatttatgcacggacttccataactacaggtatttttaggtaggagctagtagtatgactccttactccagtatatgtgctcgtgagtacattttgaaagtttatatatgcccaccatggttcctccgttaggaaaagcctgggacttctggtgcatcaaggccctggtctttcaagacacacaaagtgaccaga

SEQ ID NO: 50763 - DNA, 377 bp, Mus musculus
  source 1..377: mol_type = other DNA
cggctcactaagccagttctgagctttcaggtgcggtgttcatgacccctcctctcaaagataaacaataatcagtaaatcagtaatgtttatgaatttttgcttgattgcccttactagtctaagggatactgatactgcccctgtgcctgaatcaggaggggcgtggctgctcctttcaatggagaatctcggaatcaagcatgctgcctggcacagcatcacactggtccaggtagaaggctggaaagtttccggaaccgcaccccaggctctgcatacctttcctgagcaaggtcagctaaccaaagccggaggtccgccaccgcaggcctatctggcgccgcccgaggtctacctgccgcgcctggtgggtg

SEQ ID NO: 50764 - DNA, 351 bp, Mus musculus
  source 1..351: mol_type = other DNA
tctaagactttttcaccttttaaaaaaatactaatttaaaatatttattttatattcatgaacgttttacttgcatgaatatctgtgcactgaatgcaacctaccaaaacttttagggtacggagagacttctgtttaattagaaaatttgtcttatatattttattttaaagtaacatttataagacttatcccttgaacttagcagaatggaccctcccagaggcccaagtcccctcaggcagctgtgtggggcctcaggagaaaatcaaatccagggcgccttgctgggggtgtacatcatccggtctgcctgacaggcaggactgagaaaggggggttccagccccc

SEQ ID NO: 50765 - DNA, 393 bp, Mus musculus
  source 1..393: mol_type = other DNA
tttcaccttttaaaaaaatactaatttaaaatatttattttatattcatgaacgttttacttgcatgaatatctgtgcactgaatgcaacctaccaaaacttttagggtacggagagacttctgtttaattagaaaatttgtcttatatattttattttaaagtaacatttataagacttatcccttgaacttagcagaatggaccctcccagaggcccaagtcccctcaggcagctgtgtggggcctcaggagaaaatcaaatccagggcgccttgctgggggtgtacatcatccggtctgcctgacaggcaggactgagaaaggggggttccagccccccgtgggctggccagggctttattctagagtccagagcggcgcgtggctgcgc

SEQ ID NO: 50766 - DNA, 244 bp, Mus musculus
  source 1..244: mol_type = other DNA
tatttagaatagtcagaaaattgtgtgtattataataacatattatcaagcaacatgttgatgcgactccaatgatgtgactttaagattaaggtcgcctcttggaaacctttcccccatagctgaaatggagtcatagtgcgcatgcgtctccgcgcccgggggcgggggggggaggaggtgaaccaccccgctccccgcggactgcgcgtgcgtgacctcgggaccgcgcgacctgcgcgcg

SEQ ID NO: 50767 - DNA, 537 bp, Mus musculus
  source 1..537: mol_type = other DNA
agatcacggagttttaaatctgcttgattcctcaggtaaacctgccctgggggggttggggaggaaatcgcactccaggacgtgtttctcgtcccatttccaccttatttaaaaaaaaaaaagaaaagaagcacatagctgcgaacgtagctttggccacagcttagctccctaagaacctaggctccaggacttcctagctgggaactccaaggatccgctgcggtgcctcgaaactcgggtcgggaccaggagggagcttcgaggagtccaccaccgcgggccgaggggctctgctgagtgtgacacagagcacccagggtgcctgccttctgtggccgcctgcattcggccacctgggctacagagggcctggaggagccggcccgcattgcctttgcgcaccctggtggctccttggggacacagcctccccctcagccgacttggtagccgcccgtctctctgcggaggtcgggggcggagaggaggcggtggccgcccccaccgggaggggcgcccggagtgcgcggtgtg

SEQ ID NO: 50768 - DNA, 277 bp, Mus musculus
  source 1..277: mol_type = other DNA
aatcttttctggctatggatacattgtgactgacaacggatacaatgtgactggttgcctccagcaacctgctcccatttaagttgatggtgtcaaggcattttttcccctcagcaccacataatgaacaagcattaatcgtttaatctttcccttttaagtggagaaatagatggcacagtcttgtcagtcaccaggatgcccttcatttctgcagattacaagagactggctgagtaacactgggcgaggcagctggcttggagcagagtccgcc

SEQ ID NO: 50769 - DNA, 431 bp, Mus musculus
  source 1..431: mol_type = other DNA
agtctatgctcctataagtaatcctagttaaattaattcaaataaaatatgcaatgttcatttttgtgatctccaaccataaaacattttcactgtacttcataattataattttgctactgttatgaatcattatacaaatatttaatatgcaggatatgtgatattattcacaccttattaggctattattactataagagcagagctgcttctaataccaattcacaaaactgtaacataagtgatagtatgtccaacacattttcttcaaagaactataaaataggtctcaaaaaaagtcaatagaagaaattctatgactaaattggagggttcataaaggatcccccagattccctcctgatgtcattaaggtcttaaggcttcttgtctacagacccagtgaagtcaggtctgcagcagagacc

SEQ ID NO: 50770 - DNA, 401 bp, Mus musculus
  source 1..401: mol_type = other DNA
acatggaaatatataaatctaactacaaattttaactaacaatatcggattataaaactctgtactacatttgaatactatttgaagtgtcatttcaaaatgaactttgagatcagcaactctgagtctcactggccagtttcagcggactgtgcaggagaactgtcagtttgcattgtttcaaacacaaacctgctttgatgctgccatctaaataggagccgcagcagcaaaaaaaaaaaaaaaaaagtagcgcgtttctgggtaattttcacccgacctgtccactcgctaccccgctggagtggagaggggaggagggggcgggccctcagagcgttagtctggcaaatctgcccggcagtgcggggcggggccgccagagtcccggggctgccggt

SEQ ID NO: 50771 - DNA, 415 bp, Mus musculus
  source 1..415: mol_type = other DNA
gttttacaacaggtgtagtaagaggtgacaaagccaagtcgcttttttattaagtcccatcacttaacatacccaccgacactctgtgtagtttagttctttccagataaagctctttgagcaatttccccatttggtctccaaactggtaaggacaaagggtaatgtggatttacctacaaggaactagacaataaattcagttggatagctgacattactcccagttggtttattaaaatcaaatatgttaaccattgttctcaggaaagaaaatatatcttatgattggactgaagtgtttgctaaaggtaaaaagcacaaggggacttctctgcacagtttcctttgtttagaacagtttccacattgttcttgtgagacttgccaagcgatcaacagccccaggctagcg

SEQ ID NO: 50772 - DNA, 436 bp, Mus musculus
  source 1..436: mol_type = other DNA
caagcttgatgaacttggaaaattggaaagactttgattccccttccatgggattgctgatctctgagagtctggttccagagcaacttctttgtagccagagaaaacttgtagcctttcatgcaaatccactacaaaaagtaaatctcagcactcaaggccagcctggtctacaaagtgagttccaggacagccagggctacacagagaaacgctccttgcttcctgaaggagcagctaggcatgctggctgttgttctgagggacctgggctcaattctcagcaccccctcacccagttccaggggatctgatatctataaaataaaataaaactaattccttcttattgaacttgtcactaggatcaagtcattctaagttgaatctttggaaaaaaaaagtttttaacaaataattataatggaaaaaaaac

SEQ ID NO: 50773 - DNA, 159 bp, Mus musculus
  source 1..159: mol_type = other DNA
taattccattagataaatttgcagtcttttcagaattctctaggaacttcactttcagagctcagagagatccacctgcagcaataattagtagcagctcacacctctaaatcggattttattaaaatcagccacaaaaggagattttagcatcacaat

SEQ ID NO: 50774 - DNA, 598 bp, Mus musculus
  source 1..598: mol_type = other DNA
aagacctcgcatgggagatccatggcctcctgttgccggtcgcccggcgagggccccaccggtcccggacagaggagaaccgggatgctcctggggaggaggggagaatctcctttcagtccctacgcctgggtgaggagggagaaggctggtccagccccgcggtatccagcttccggcaaccccccgctccgacccgcggagagcctccctggtcccgctaggggaacctcgcgcaggactaggagtcccgcagccctccgcctcggagcgcctctgtgtgccccggcggccccagccccgcgaggggcggagtgggcgagaccatctccagcgctggcgagggggggagacgaggcggggccaaggggcggggccgccttgcctggtccagattgcttagcctcgggagaagcccttcggagactcggcgggcggctcggccggcgtccaggcagcccggcggcagggagggcgggctcgtcccggtagtgagggtcggcggctccccctcccgcagggcggggtggtgcgttccgagttcccaggagttcgcggcgggcggggaccgcggggaggggagtggcggcggcgggcg

SEQ ID NO: 50775 - DNA, 183 bp, Mus musculus
  source 1..183: mol_type = other DNA
ggatgggtctgactacatcagagaggtccagtcacctctgacccctgcagatggcgacagctgttaacatggagggaaatgcctgcatgtcgcagcctctttagagctctttcagtaagtctacttttcagatggtaacagctttcaagaatctcccttgtctcaggctgagcttcagcgagg

SEQ ID NO: 50776 - DNA, 346 bp, Mus musculus
  source 1..346: mol_type = other DNA
tacttctagaaccagtgttactagactgtcaagaaattagatttccagacaattcctcaataaattaaagattactttttcttttttcttttttggctgtcctgaaactcaccctgttgacgaccaggctggcctcgaactttttttagacactctgtaacacagaaggagtggttaaaacgtccaatttgaaggtttaagcttccatcttaccctgagggagggtccttctgcatccggagagactaattttatttatttatttatttatttatttattttttaaaggagaattacttaagaactcagctttttgctatcaattatcttttacttataaaagaag

SEQ ID NO: 50777 - DNA, 235 bp, Mus musculus
  source 1..235: mol_type = other DNA
aggtctctagctacatatgtatcagaagatggccattgaagaaaatacctaataataataataataataataataataataataataataaagaaattcagacagacagagcgagacagagtgaatttgaccttcgcattttttaatcagacttgggtagtgataaaaattcaccttttggcatacaaaagcacaggggatttttccttgttacagacctaaacttatatgttgg

SEQ ID NO: 50778 - DNA, 320 bp, Mus musculus
  source 1..320: mol_type = other DNA
tattgaaaggatctcttgtgagactatgccggggcccagcaaacacataatggcctagcaggcccataggacttgcaaactttatatgccccagtacaatgtaaatgagctaagggtatttgagcatgtcaagaggatttccctatgggacaggtgactgctatccttgtccgctgacaaagaagagagtggaagaacatataagtaggatcacccttcttggcagtgacccacagccaaggcagctgttgcttcaagtttattgtggtgatgtgtcaagacacagaaaatatttacatatgtgtgcatatatattaaga

SEQ ID NO: 50779 - DNA, 198 bp, Mus musculus
  source 1..198: mol_type = other DNA
aaggatgataaactttgttctaaatctttaggagaggaaatcacctccacttggatttctctaagaggtatcctcacaccttgtgggaaaagtgaaaagataataccagaatatattgcaattctttgatgctgtgtctatagagttctctgcaaaactttccaggtaccttcatgaagtgggtttacttcctcaagt

SEQ ID NO: 50780 - DNA, 369 bp, Mus musculus
  source 1..369: mol_type = other DNA
gaacttcttattacacatagctgtggtttagcaacctcgctacagctactgcatgtaatacatagaggaaacccctccaatagatgatgcctcagtcttggttcatgtttcatatgtagcaagaggtatcctaacaccattgggtagacctattgtaggaactattttaattaagacagtttgaatgcagctcataccagaattattgtagttcccttctgcaaggcattccaggcacctccaaggggtcaagagtcaccgactgtgaaccttgtaagtttcagctttttcaagaatgtttacttattcacaggaaattgctataatagacatccgggatgtcaaaacgtactgaaagtatttactgca

SEQ ID NO: 50781 - DNA, 400 bp, Mus musculus
  source 1..400: mol_type = other DNA
tagtaggagcgaaactttaagtccttacaataaatccacttaatataaagggatactccataagttctgtgactgcctcctggtttgggtccgtacacacacacacacttgggtcgttgcgcacacccagtcgctgtcgccagtgcaaggacagcgaagcagctgcaggtctgcccagggcggggaccgaaggagcagctgagtggtactgactgatgctcaggagcagggacttcatggaatccatgccgacgagccggcctgtcagcgacgtcggactccggaggggttgcgggaaggtggcagggagccatcccctcccacccccgccgcagtccccctttggcggagaggccgcgaggtttcggctggaggtccgcgaacacgcgggaatctcgcg

SEQ ID NO: 50782 - DNA, 324 bp, Mus musculus
  source 1..324: mol_type = other DNA
tgggattgcaagttccaaatccagagagggaattctcactagtaggagcgaaactttaagtccttacaataaatccacttaatataaagggatactccataagttctgtgactgcctcctggtttgggtccgtacacacacacacacttgggtcgttgcgcacacccagtcgctgtcgccagtgcaaggacagcgaagcagctgcaggtctgcccagggcggggaccgaaggagcagctgagtggtactgactgatgctcaggagcagggacttcatggaatccatgccgacgagccggcctgtcagcgacgtcggactccgga

SEQ ID NO: 50783 - DNA, 589 bp, Mus musculus
  source 1..589: mol_type = other DNA
ttctgtataaaaattgcctatagtataaccatgattaaagatgaaggaatcgacagactttaggttgacttatttgcctggcaatttagtcttgccaaatatttcttgactcagtaaacattttctagttttgtaaactatctgacccagatagtcatctctgagtgactttttattagtttatactcacactgaaaacaaatctgagtgtcatcttattctatgtataatatttgatatacctagaggccgttaagcgtctgcaacttgacatttgtcaatttcacgactcagaaactttgtcattcttgaggcatttcctctacaaaattattaaaatttggttttgaaattttgttggtataaagataaagaaaagctgggccgtgattattatatgtcaatattttatttatatttttcttctgacatttaaagtcagtctatacattttcatagattcctgaaagaatgtttttgactctaggcactgagccttcaatgcttaatgccatcagacatagaagaaacattctttggtatataatgaatgattaatcattttagaacaagtgcctcaattattttt

SEQ ID NO: 50784 - DNA, 322 bp, Mus musculus
  source 1..322: mol_type = other DNA
tccctattttgaatgttttaaaatgtataaaataaaactcataagatcgtccctttccttagccttggaaaagggggtcagtatcagtcccagaattaactatgggtgcgcatgcttcacacacatgcatacaaacgcgtatattcacatacacacattcaggctttatgtcatgtacatagagtaacacaaggccctaggccagcattatgaactgataaaacgctttgataggcagtttccagcctaaggtttggctcacagtggccatgttgaacatactatatccccaagatgaggtggctgtcacaactgaattatg

SEQ ID NO: 50785 - DNA, 484 bp, Mus musculus
  source 1..484: mol_type = other DNA
cctccgattaaaataataataataataaaattctcaacggtgcctttctttctttttttttttttttttttttttttttgacgccacagaaatgtgcaaaataagtccgggagcgactccgggatgctctcccgtttgaggtcttagcctgcgcgagtcgcctgcggccaccagggaccagggccgcagaacctgaggcccctctcccgtctagactaggggggagcggccgtgtctcgggcagaggctgaggcacgcacggaaagccgagcccgccgcgcccaggccgaggaaggcccggggaccgagcccgcgcggcacggagacccccgttcggagcccgcacgagctcgtctcgcgagattcccgcgtgttcgcggacctccagccgaaacctcgcggcctctccgccaaagggggactgcggcgggggtgggaggggatggctccctgccaccttcccgcaacccctccggagtccgac

SEQ ID NO: 50786 - DNA, 615 bp, Mus musculus
  source 1..615: mol_type = other DNA
accccttaacaggcacagggttaatcagacaaatgttacacctcttgcttctgagttatcttaagaagtagctaggcaacttctctttcttatctttaactacaagaaagattgcctgatgcagtactttattgtaaggataagtcacatccctggtcagttatgtctccagtcaatacgtgctgacataatagcagaaatgttcttatctaaatgtaagtgctacaatgcagcacttcctttccagatactatattttgtgggatttcattagtactcaagaatttaaatctggaacagattgaggccaatgtgttcattgtaagactttaagtcttatttagaatatactcgtaagtctagcactatctaataagcaattattaagctgtgaacctaaggaccagatgtctgttcattcagcagccctgagcagaataccagatcctgtgctcctcttggctgtatgcagcgctaaatagctggggaccctacgcctttaaggcgcgcgtgggggacgatgcgccacgcccatagggcggagctaccccctaggccagggaccagcatggcgtgacgtcacgtaagaccgtggtgaccggctgccctgcggtt

SEQ ID NO: 50787 - DNA, 490 bp, Mus musculus
  source 1..490: mol_type = other DNA
gatcaagtccttttagtcaaaggacctttgcctcagggtggcttagagctacacttttaaacctattcaagaactgaactcaaacaggtcagaggtctacacgcacacggggcctgtctgccacaatccttgtgtcttgcccaaccctgcttgggggatgaaaaaggagttcctcgggggccaggacctggtcacagcgccctctctccgcccagccctgcggctccagggctgcgcgccttgggaggcgcagggacgcgtgcctcccatgctcccgtctttcaggccggcccaggacacgaagcgagtgcaacccgcgcagccccggggacaggctgattcttggcgctctccgccggagcctgcccagggctgggtgtgaggctggcgtcaggcggccaggcggggcggagtgcgcgtgcgcggggcggcgagcacgcgcgcgcgcgcacccccgggcagcctgggcggccgctcctgcctgtcactg

SEQ ID NO: 50788 - DNA, 519 bp, Mus musculus
  source 1..519: mol_type = other DNA
tgaatcatctattcctgacagaaggacttcactgaattataacacatttttgatatttaactgaagagccatagtttcaatattaactcattaggaaaattagtccagccataaaataactaattaattgatgaagctgtaagttagtaattgttgttaaggatttattacagttgaaacaagctaaaaactgtgtctcaaaaactcaaatattttgattcttaaaagccatgtgtattttcttttttctttatacttagggaaaaaatgagtggttgatttgttacctttcaataagtgataagaaattaaaggcaggggcatgtcatttaaagtaacttgaatttagtgtcagattcactgagtttggataactttactctgcactgagtaattgcagggactgtctttttagtattcaaatcagtgataaacagtttgggccacgttgtctaaaaagcactttgtttgaaaggcctccgtggctctcctgctgcatcacagaagctggaagttctg

SEQ ID NO: 50789 - DNA, 578 bp, Mus musculus
  source 1..578: mol_type = other DNA
aaaagagaagccttcattctgaaatgatgggactcgattctttatcacttttaaaggaatgatgaagcttagtttgcaaactagtcagaatcatagccattcttctttgtaatttgtaatttctatcacacatcagtagagatattctttaatatccaattaataagtatattttgctagaaaaatttgacagtagactataaagtagtttcctgacatttactttgaaagaaaattcaatattagtggaaaaattactgagtatattttatttctgcattcatatctgagtgcctgttggtcaaacatgaattatgtgagttagaagtttcaaatcattagttttgaaaatgggttgagatatgtgtctccctttattttacctaagaaacttgcttctattgtgataagtagaatatagtctataagataaaagtttgcataggaaaatgtttgtgtgtaaaaatataaagtaacatttttgttactaagatccagggtcatatgaaatcagtctttcttttttaaaagagttatcactctggtcctctgcaagagcacaaagtgcttgctttaca

SEQ ID NO: 50790 - DNA, 212 bp, Mus musculus
  source 1..212: mol_type = other DNA
aggctggcctcatatttagaggggcccaaagccgtgagcagccactgctttaataaagaaaatgtggtcggcactcagtgcttagggctgaagagtggaacctgagttacagatggtagtgagccaccatgtgggtgctgggaacccaccctactgtctccgagatgccaattcccagtaacaacacggagacgtttcaataattatcaatg

SEQ ID NO: 50791 - DNA, 277 bp, Mus musculus
  source 1..277: mol_type = other DNA
ctttgacttgtttatatcaaactgttaacaagatctgccaaagatagtaaaaatatcattaaaactagatctatgtgtgtgcgtgtgcgtgtgcgcgcgcgcgcgcgcgcgtgtgtgtgtgtgtgtgtacttggctatattgaaccacaaggtgtgtaatttcagcacaccttgtgtagcgtggagttgtagttttctacaggtcccgaacattagaaaatagaaaatgtggctgcgccgcccgtccgtcacggcgcgggccaatggcaggctgcct

SEQ ID NO: 50792 - DNA, 554 bp, Mus musculus
  source 1..554: mol_type = other DNA
tggagcggttgctacaagcaacctctctaatttgagaatccctaaaatatgctagaatatcatctactgattgtatacaatatcaatgaaatcaaacttgacaattaatgaaggtgatatattataactctaagatacctaattgaacagttatttggccctagaaaatcttcacagggcctaagttggccaaggtaaacaggaccatgctgaccctaatcattctatagctagccatttgtgagccaaaattcttaaatcacttttggctaagttcagagtttatagtgacttagtagcaggttgtaaatgacattaattttttttaatccctaaaaagggacatataggtatccagcagtattcattttgattctgaagtgttcaggcttaagtgttcaaagaataaaaattttacctcaatgcatcatatagacaaaatattatttagtatcttaaaggatttatatttccaagatcactttctcagaggcaatagttctcaaagtgtggcagttagtggtcattgtgacatcacaatcagatgaggatca

SEQ ID NO: 50793 - DNA, 321 bp, Mus musculus
  source 1..321: mol_type = other DNA
ctaggctagccaattctagcggaattgaaatatgtgcatgtaattatataacaggttcatgcctggcaaccggagcaagaaattttaattagttatagaagctaagcaacaccctcggctagcgatgatactggtcccctctcgaccagagcaatgtgtactactttgctcagaaaggaccctttctcttttcagagctctatcagggaaatatttctactgcagcaatgtctgatgcttacaaattaacagagaaaataaatttagttctcacagatctgaaggatggaaatacaaaattaaaatgtcaattgcctcttt

SEQ ID NO: 50794 - DNA, 448 bp, Mus musculus
  source 1..448: mol_type = other DNA
tggaaaagaaaaattatatagatcaggactcatgtacagtgtaaggaattttataaagttatcttgttagaatgtaaattgacatctaaatgtgttatgtaatcaacttaatcctagatttaaattctaccaacaaacgataaagtaaaaattgaatattttttggaacaactgaggaaattaaatcatattaactctatcagatagaggttactaaacttgttacatttcttgaccccattttaagcctgtagtcaaatatgggcacatacgtagcagaattcgagtatattcttgttaagtcactccaccacgggtgcttgagaaaccccgatggagaaaatctgaggttcacaactaattcagaatccagtgtgtcagcggcgactggttcctagccgcagctcagccagcagccaaagctaagcggtgggcgtggcaccgcgcg

SEQ ID NO: 50795 - DNA, 433 bp, Mus musculus
  source 1..433: mol_type = other DNA
aaggctagagccttcttgtgactgacatgtggtgacaactgtttaaatcattggttacaaatggggccagaaggaagaatggggccatgtctgcaaatacccctttcttagaagtgatgttggcctagagaatagaaaacagcagtttagtattctcaaacttataatgcctctgaattaaacattttaccaaaggaggaagagcctttcttcaactttgcgagtaaattgcaggatttaataatttaaagactcttttttttttcttctgttagttgaaggaattaaaaaaaaaaaacaaaaaataaaggtctcagaaattgaaatattcatacagagtcatttatgatataattgtaagtcacaagagtaattcaaaatcattaatattaatgacttctttagtcattgaatttcttttaaaatctcatca

SEQ ID NO: 50796 - DNA, 561 bp, Mus musculus
  source 1..561: mol_type = other DNA
tcattaaaatgaagattcatctacatagaagaatctttactggaatcaaaacttgtttggaatataaaggtgtcaaacagattagtaatcctttagctgagagttgtcaagtatttgctttctcatgatgtttgatctggaatccttctagaactaatagtaaaagggaaacatttcagaaatttaggaagttttctttatttgacagtcaacaagaaacatggtttggctgctctcctgggtagcagtttggcagccctagggagatgaatttcttaagcctgggacccgcccagagctgaaaagcagcaccaccctggcagcctctactctgttgctatgcccgccttttagccccagttggcttagactcccgctcggggcgctcacgcccacctgcgccaagtgggacgcagtggagtgggccttcctctgggggcgcgggaggagcgtctcgtcccgcccattggctccgcccgctgtctggcagaaagcagcctctcaggttcgaagactcaaggctccgccttagctccgccccacgccttggtctccggggat

SEQ ID NO: 50797 - DNA, 613 bp, Mus musculus
  source 1..613: mol_type = other DNA
cttatccccacgtgttaagatgttacttgaaaatttagacttaatcattcattctctgtgtttatcaggactaggtcaagttgtgcagaataaaacgttacataatacgtaaaaaataatataaaacatacaaagaatatacacgcatatatgcgtattcatcattttgcaggatacgaaatagtcattgctgtttattctaatactgtactaaaaaaaaaaaaaaggctctgaaattgagtccagaggagactgaactctgcacgcaccgctctggcttcccactccccgaactgggcggacctgttcttgcagcagcccggggctcccgctcgcccccgggcatcgcagcccctgcgcagacagcggttgccgcggaccccgggcccctggggatgcggtgcgtccaggctggccccgacgggggtggcgcgggtgctagccggggtttccaggtgagccgccggaaaacaaccggtcggcccgggcggggcggggcgagggcggagggcacattgcctcatcccgggcatccggaggcggggcgggaggcagcccaggcgccgcctcaccgggcggagcgcggaggaggaggtcagttcatttaaatagc

SEQ ID NO: 50798 - DNA, 364 bp, Mus musculus
  source 1..364: mol_type = other DNA
tggatgcctggctttctggatttgtaacttcaaatcgtcacctaattaaaagtaaacgtgactttttttttctttaaagaacgttttgaaacgatagttgattaaatgatgagaaggagtaaccttctcttcaaagtgggggaaattactctcgggtggagaaaagatctcagatcctattctcattggccagcgtgtcctgtgggaggcggagtcgatgtcagccccgcccaccagagcgcgggggctggggcatcaggctcttctcccaccaggggaggctgcggatcggcgctccaaccacctgctccgcgctgccgccgaggaagctgggcgggagaggaggagacaggcagcttacaca

SEQ ID NO: 50799 - DNA, 344 bp, Mus musculus
  source 1..344: mol_type = other DNA
tgagagagaattgccagaaactcattttaggatatttaccctttaaaatattctatccgagatgcattacacacatacagaatttccattattattattattattattattattattattattattattattattaatcaaacgagaggtagtctcggcaggcagaagttcctccagtaatcctccagactagattcccgggacactgggacaggagtcctgaaaacagctctgcggggcctcagtcctccgcgcggctccagtccgggtcttggggaccgccctggcggggaatgtccgggactccagcgtgtggaaaaagtccacagggctgggcttcccca

SEQ ID NO: 50800 - DNA, 468 bp, Mus musculus
  source 1..468: mol_type = other DNA
ctccattgtcaataaatataatgataattaatgacagttggaattcatatcgattctacttcaacttgggactaagtctgagggcagacttttttttttaacattttttaaaaagatgtatttatttaatgtatatgagtacactgtagctgtcttcagacacaccagaagagccagtgcgaacgtcttttgtcccacacaggcctttctgtatcctctcagtatctcagattcaccaagctgcttttgacataaaacgtccaaactagggtaatccagcattgagggtggtttgagcttcaagatggtaccagcagctccgccactgctaggccagagccctcgggctagagtgtatctccggaggtacacagtcctaacccaagctccctggggcggtcgggtagcacaggcagtgccaactcccccgccccgcccatagtcggaccaatcgtagccgggggtcgg

SEQ ID NO: 50801 - DNA, 373 bp, Mus musculus
  source 1..373: mol_type = other DNA
gtaacttcaggttttgagacagggtctcacactgtaaccaagatctatttgaactagtgattaattacttttagtttttgataaaaagcttgccccacagtggcgggctctaatctgtgcagccctggctgtcctggaactcactttgtagaccaggctggccttgcggcaccactgcccggcacgatttatttttgtttcaaggaataatccaaagccaaatgcaaaaagtgaccttcaggttttacctgcgaggaaagacacgtagaacatccttgtctcttgtttattggctttagattctctgttgctaggaaacagactgacatcatctctgggcggaatttagggaggagattctctccctctgccc

SEQ ID NO: 50802 - DNA, 469 bp, Mus musculus
  source 1..469: mol_type = other DNA
tattggcaacattctttttatgtgtattctcaagatttgattcaaatatcccgttagcggtttttttttttaaagtacaaaggcgtttaaaagctagataatgtgtgtgtcttctaggcagaaataaagaaaaatagcttctttaactaaagtcattgggttgggaagcctggaaccttctagcttcaaggaataagaccatggtgatgtttctagaaaattacttaggtagtttggagaaaattcgtaacactgaagcaatactgcgacagtatttggcccagaggctcagacagtggcaattctcagagtatacagaacaactgactcagttaccgtttacggggagagggccctgccaagactccgcagtgttgacgtcacaccgccggctccctgggagcgcagagccgtagcgcgctccaatcggggtggcggccccgccccgctcccgcgcgtcacttccggt

SEQ ID NO: 50803 - DNA, 473 bp, Mus musculus
  source 1..473: mol_type = other DNA
ggtgcgggcaacatacatttttaaaaaaattaaaaagaaaaaggtcaagcttttctgctctcactcccaaataatcaatgatttgatggtacaggtccactcagatccttaactcaaggccggcctgagtaatttagtgagatcttgcccaatccgtcaactgcgtaacacagttcctattttcacaagaaacaggatccctgtcaccgtgatttggcagtctgttctgtgtcgcagttgcagaaacagacatttggacctagtccaatggccaaatccgagcggcactcactgggagacggcaagagggagagggtaggtctgcctctgcctctgggtctcccaccatcccctaagggcctcgggggcgggcccagataggccgcaccacgccctccaccgcctggcccggccccgagggaagcccccgaagccccaccccgggcgagggtccgcccccagcctcccgggcc

SEQ ID NO: 50804 - DNA, 588 bp, Mus musculus
  source 1..588: mol_type = other DNA
gcgagtcattctatagagaagctaaaaccctttaaaattaattcagacagcaatttctcaacatcagtttgttttaaacaatgtccttataatgtgggtggtaaaagtgttgaatttctcgaacaccaatgactgtaaagttcatagttaataaagtaagtattcctgactctggaaactattttaaacttttttgaatactctggaaaaagttctgggtacatatgtatcaaatatactccttgaccaaactgttcaatttaaaacaaaaatatcagtttctgaggctttaaatctatttaattaggtaagattgggtaaattgcaaatataacgtatccatttgactatgtcaaaatatttcactgtcattcctatagagaagctaaaaccttttaaacttaattcagaattgtcaacttctggcaatgagttctcaaattcagttttaaacaacgtctttataatctgccctggagtgaaatggtttatctaacaatacagcttgctcaccagatcaactcccacattgtagccagcaagtcccatcagggagccaattgggtgtagtttgcagcgccccactgc

SEQ ID NO: 50805 - DNA, 378 bp, Mus musculus
  source 1..378: mol_type = other DNA
gacagttttataggagtaaagaaaactcctccgtaagaaagacagctcctgcccttcggagtgtattttttaaacaggtgtttgaatatatgcaaatttctggaactggagttatcagttaactgtagaccacccaactgggaattgaaaatttttcacgaatgcaaaagccgcggaaatttcttccgccccaaatggaaacgatccgcactggacggtgtcaacactgacagcgtccgttaactgcccaccgctgagcgtggaagcacctaggattgaacccaccgttccacgatcggtgagtccgtactaacccgagcggcctcgctggcccgcccgaagctttgtggttgctgggcggggccgtgacgttcttgc

SEQ ID NO: 50806 - DNA, 376 bp, Mus musculus
  source 1..376: mol_type = other DNA
ttccagatctaaacaatatctattctaaaatgattgattcctcaagaaaccaaagcattgtgcaccttactaacaataaaatctattttaccaatctgccagaatctttcactcaaagaggaccaatacccgggggtatggtatgtacacactgtagtaggtactagcaatagtactgatttagaattagattttatttactctctgggggccattagcccgcctagaattaaattctaaaatagaacgtgaagacttgagtcttataaggatatgtggcagggcatcggtggcgagcccccaaatcgactcaaaacgtcattttcgcagaccggaggggcgggacatccggtggtgccggacttccggcggccgc

SEQ ID NO: 50807 - DNA, 174 bp, Mus musculus
  source 1..174: mol_type = other DNA
ctccttctagcaagattatgcgtagctgtctcttgagatggcctaggcaaaaaaaaagaaaacttgacaaatgtgatttctattatgcgcttaatattcacaatagtgccacctattattccttcactgcgcacaggatgaagagtgagtagttaaaagtcctaggagaatcag

SEQ ID NO: 50808 - DNA, 369 bp, Mus musculus
  source 1..369: mol_type = other DNA
ttaattctagtggctattttgaaaagaattagctttcttgctttggccccagactcgcaagggaaacaaatgctagcctttatctatcagagatctaagtgctgactgttattttggatcctgaggcctaacagtaccaaacacaggctttatagtttttgatagaaaagactcatatttgtttatttcttacatcaaacaacaggaacaactacattttgctgtccttgtttctccagacagtagcttctcatattttggggggtaatctgtaatttttgtcaactcaaattttattttaaagtcaacgggttaaaaaatcaggaagcgctacctctggcagaggtgcaagcgcgaatctcacttctg

SEQ ID NO: 50809 - DNA, 509 bp, Mus musculus
  source 1..509: mol_type = other DNA
tcatgaagaaagtcctgtaacttacatggtactgacgggatctaaatgtaaaactcagtgctctgttacaaagcccgtctggattcggcagactcgacctagcctttcttactagtaaaatggagataggcactgtgccctatggaatatgttgatatacataaaacatatatgtatgcatttgtatgtgggtatatatgtacacagtatataactgcacagattatagctacagaatagttcaaaatatatttttatgaattcacttccagtttaaaggaaggaatggattggtttcctaactaaaaacagtttccatcttaataaaatattcattttatattttagtgttttgatgggtttaagtgtacgtttttattctttaaactagttcatcaaatgtttcaaaataatttcaattcttatgtgatgtcatcttgtctccaccccctgtgtaagcccacagcagagagagcagcctcccgcctctgtcagtggaggacgcccac

SEQ ID NO: 50810 - DNA, 426 bp, Mus musculus
  source 1..426: mol_type = other DNA
gttaaaggagattaggttgctgtgtactaagattcctggcacccagattgcaagcagattgaaatgtgttcagcgtaaaatacatttattcaaacactttagacttgaattctagttgctcagacactagtcagggaccaatgtgctttgtgactgagtcacctcactcaggatgataattctcatgtagggtatggtcaaatctctatcctataaaagccttcagtcctaaatgtttgggtagagcgtaggcactcaatcctgaatgaatgaatgaatgaccggaccggaagtgctggtaattccctgcgcatccagtgaggaagccgggccgctcacccgacgcagcggggtcttcgcccgccccgcccctcacccactgcgcatgcgtcctgactggcttgtgcgcctggaggcggggcgcca

SEQ ID NO: 50811 - DNA, 426 bp, Mus musculus
  source 1..426: mol_type = other DNA
ctgcaacttcagagaaacagcagtttgtgattagattgctgtgaagtactacaaacttatatggtgtggtgacctccaactataaaagtttttcattgctacttcataactgtagttttactactgttatgaattgtactgtaaaaagctgatatgcaggatatctaggaagactataatctaagctttttgtgtgcacattggtgcccagattatctcttataggttaagagcactgactgctaacttatctttaatcaaggctgcataatgtaattcataatagatgaattataactctgttttagtgctttgtataaaagtcaatatactcaatcaccaattgtgactgttagaatttaggcaagagtgacctgaagcacttgctgaagtttaaatctgtagataaccagagggatccactgc

SEQ ID NO: 50812 - DNA, 409 bp, Mus musculus
  source 1..409: mol_type = other DNA
ctgtgaacagagcagcagtccacatgagtgaacatgtttctttgacatatttatttttattttatcttattatttatacttatcacatagcatggggttactggatcatatagccacatggctttctaatttacattcctgtcaatagtacataagggttcaccttagcttgtccaaattttaagtgggccacctaccgttagtttacctagtaggtatcctgagcacctgagatgctattgtgcaacacaaatgcacattacctctttggaatccagtgcacaattaaatatcaccattatctttttttttaatgaacacaagggtgtgtttcttggctttaactgcacggtgacacaatgtgaaactcaactgcttgacttcatgctggaatgacaagcacacaagc

SEQ ID NO: 50813 - DNA, 304 bp, Mus musculus
  source 1..304: mol_type = other DNA
ttgaatctacattcctgcaaacggaagcaatctttttttcttttgtgaggatagtcaacaaacaagctagctaatcttgtgaagcagcttcccatgacagaatgtgcacatcaaacatgttttcttcacagaaacgaccacatttctgaatagctcacgtcttactaaaaggttcattattcctgacccacttttcttttgccagagaaggtgtgaaggcgtgggtacggtactgcagtgcctgcgcggcccgcaggagtggcgggctgctccaccaatcggcaggaggctttgcctcccagtc

SEQ ID NO: 50814 - DNA, 316 bp, Mus musculus
  source 1..316: mol_type = other DNA
tgagatagcatttgaaatgtaaatgaagaaaatacctaattaaaaaaagtttattttctaatgcacttccttatgaagccaaggccctggacagaaagcattttctaatatcttgctctgttttttggtaataagacaaacatccttacgaacgtatcactatataagccagtctggcttcttaaagatctgtgccataaagcctttctccagtagagctctggctgttcagcatgctgaagccagcatccacaactaaactacagagtcttacctggattaatgagaatttttttatgattaatggcatagaaca

SEQ ID NO: 50815 - DNA, 398 bp, Mus musculus
  source 1..398: mol_type = other DNA
gagcactgacaaccatctgtaatgggatccgatgccctcttctgatgtgacagctacagtgtagtcatataaatgaaataaattttttttaaaaatttaagttatttcaaataagtgagcaaactcaaagcgagggaaagccttctaacagacatccttgcctgaggttacaaatttgtccaaactacaatctggctattgcagaaatatacaactgggaggcccacagagctacagggagctgtccctccactggcgacagtgccacgggtccttctgtcctggagaagaggtctgcagtcacgcaaggcctgagacctccagtggttctcccctgtacagtagataggggcgggcccagccgccggtctagcccggcatgccccgggcttccggtg

SEQ ID NO: 50816 - DNA, 305 bp, Mus musculus
  source 1..305: mol_type = other DNA
aagacagctgactaaaatttcttttggggatctaatgtgacaaggtatagactttaacttgcaagcactgcaaagcttagacctgcacgagccttagctacatagcaagttaaagtgcagcctaggctaaaaataaatatttacataaatgataatgaataaaaattaaataataaatacaggttcagcatggagcatcgttaccctgtttgcttttgaaggccctatataaagaatttgtaattatcacttcttggtgttctgcgcgcgcggctcggccccgccttctgcacgctgcggaggag

SEQ ID NO: 50817 - DNA, 330 bp, Mus musculus
  source 1..330: mol_type = other DNA
tttttaagatttatttatttattatatgtaagtacactgtagctgtcttcagacactccagaagaaggagtcagagcagtcgggtgctctaacaaactgattttttaaactggaatttcagtttcagaactacagttgattctcctggctgttagaagacatatttaagatagaagactagagtataattttcgaatcatctttacaaatgagccacgcctgcccgcagcgtggcgccccgccccatcccggggtcggccccgcccacaagccttgtgccccgcccactccgttcaagtctcagacgacactgaatctctgagacagtct

SEQ ID NO: 50818 - DNA, 433 bp, Mus musculus
  source 1..433: mol_type = other DNA
tgatctcaggcagctagcaggcatgtgaggtaagcctgttaatttcagtactctgaaatatgaaatttcatgagcacctgaataatatataataacaataaaagcgcattatacatttgggtgttttgtaacactaaatggagcaacactgcgttaataatagtgaatgtttgcacacagtgctaagggtcacagctgtgttacttaaatgtcaagcaaagccgccatcagtgctgtttctggctcacagtggaccagcgacgtggcagagaagggtcctaggccatgcccagggaggagatttcagagatgtctgcctttaatctggagagcagctgctgggcacaggcatgcacagagacactccgagagcgattacctgcctctacttgtctgctgtggacagaaggcttttgcattgcccgacaaggaa

SEQ ID NO: 50819 - DNA, 408 bp, Mus musculus
  source 1..408: mol_type = other DNA
aagcgttgtattgcataaaatcaggtttgaggttcactccatgagatagaactgggccctaggggaaaacctattgctattactctaaaggaacatgatcaaaatatataatgtaaaaaaataattaaaaaaatcaaaaatttttaaaaagtgaatataataggtagatataaaatgtgtttctggtttatctcttatttttttgtattagtacaccatcattatcatcagatacaccagaatcagatcccaatacataatatgattgtgagctaccatggaagagcagtcagtgctcttaactcctgagccatctcgtgccagagagttggtcatttaaatcaatggacttaattaaagcagattgcccttcataatgtcccttcctttaaagacctgaacagatag

SEQ ID NO: 50820 - DNA, 320 bp, Mus musculus
  source 1..320: mol_type = other DNA
gtatctgtaaattgtatctttatagatgagttagtatcacaatatgtgattgtttcctagtaacttagacataacatcctcacacactgagagaccattcagtcttttccactctccctgccaaatacatagatggaggggggagaaagcaagcgacctctggctaatgagcaagtttggcttttcccatgggccttgcaagcattcgccttaaaagaggaagggctttgcatactctcttcaaatattaagttacttctaaatttaacccaggtcggacgaccgatttgcacgtcaggaccgctacggacctcctggct

SEQ ID NO: 50821 - DNA, 610 bp, Mus musculus
  source 1..610: mol_type = other DNA
tgcagatgaggctgcgacatctctaatgtatttagcaggaggtcagcgctcatttataaagatttctatacaaggaaatatgtcccagatctaattcaagatatttgggttttgtcttatttggtcagaaggagaagacagattaaaattagttctgaagttctatttttatacattgtcctgcaagtactgaacaaaacatttaatttctttaaaaatactttccctgcaaaaatatctgattagttttaactgctttcattaaaacacaggcttttcagtatcatcacttgaagaattgtttggtagttacatcatcaggaaataaaatactatcctctgaggacccttactctctacaaagagaaaagaggtttgaagtttatatgtctaaaaccccaacttaaaatgtatttacgaaagtttatgtgtatttaagaatttaaagctgcaacttaagttcccccacctggtagaagggtgctgcgggtcagacccgctggaccctcacggggagcaggggacccacggggcatgagggtctgggctgtcgcggccccgccgccgggccgcacatgccgcgcgccttataagaacgccccaaggccgg

SEQ ID NO: 50822 - DNA, 305 bp, Mus musculus
  source 1..305: mol_type = other DNA
aaagcgttctactataaaagtaacttaaatgtactgttgaataaaacaattctaactcccctgtagaccaggctggccttcaactcaaggaatctgcttgcctctgcttcccagattgctgggtccaagggccatggtaagaatatcaaaacctgattaagtattttaaatagagaagtggcttttcgttaaaaaaaaataacccaaaccgatggtaactcttttcttgtatacggcgacacccctggctgccgcagctgggggggcgtggcgtctgtgacgtcatctccagtggcgcgggcgac

SEQ ID NO: 50823 - DNA, 263 bp, Mus musculus
  source 1..263: mol_type = other DNA
caagtgagagacatttttcagttgctgattttttttttaataccgaaaataacagcatcctgtgttacataagcagacggagctgtctccgcagatggacctcacagctgctccagcctctggagcgtgggccaggctgcagcagtcagctcccagaggcagggcgcctggggctccctgggacgatcccttttcgatcacagagaaaacacctttgttattgaagctccacgggggcagcccgcccgccgcccccgctcaat

SEQ ID NO: 50824 - DNA, 515 bp, Mus musculus
  source 1..515: mol_type = other DNA
tctttaataaaggagacagcaaggaggaatggctttgcggaaaagagcctcgccagtgtggagcctcaggaggccgaccggtgcgggccaccactcaccttgctggcctccagcgtccgacagcagccggcgctgggcagcgcggcccggccggtggcggcgggcgcggccgggcctccgggaccctgggggctgcgcgcggctctcagcggcgcccggctcgccatcgcggcggccggcaatccgcccgcatagtgcgcgcgccgcggagccccgcgcgcccggggcccgcagcacccggtgaggaccgggcggcagcgcagcgcgcctcgtcccctccgccctgctcccgagcttcccgccccgagaccccaggccggagcgcggcggatcggaggatagcaccggggcccgagctggaacgcgctcccgccgcgctcgtagaccgaccgtctctcgggcgggccggccccgctctctcgccctggcgtgagcggccagatctggtccagctc

SEQ ID NO: 50825 - DNA, 404 bp, Mus musculus
  source 1..404: mol_type = other DNA
aaaggtacaatacttttttttttttttttagggagtccctaattaaaaatatccctgatggtttctctttataaatatcaaattgcctattatttgaatttgttctctgagcacaattttaccatttgtaattgtacccgcagatgttgctgcaattgactgcagttttaattaagaaaaacatactctgctatttaaaaacagccccttccagtggcctgatgaagtcccggaagtcactgaccagagagtctcggcgggttctctcttcttcagcggggcggggaccgctcccggccccggcttgggggcgaacccggatcgagggaggcgggtgggacgctcccagaggtccagggcgattggcgagctggaccagatctggccgctcacgccagggcgag

SEQ ID NO: 50826 - DNA, 479 bp, Mus musculus
  source 1..479: mol_type = other DNA
tcagagtgggaggacttcgctgccacttgacacactgtcaagtatttgaccagacactgatttttaaaaagcattcagagctatgcaagtctgagggctttcttaatacaaactttttcctagtgaaggaggaaaggagtgaagaagtgcccctttcattctttctgaggtaacgtctttttaaaatataagatgaactatatatatgtctacacctactcccactgtgtctgatgtcacagacagtccagggtggcgcctgaaaggagagccccttgctcccgcagctttcccaacaaaccggggcaggatgggagttcctgtcggggactcccagcgagagcaagcggctggtgaccgcccgagcacggctaccgccccgggggtctctgagcccaccggcagccaccgggcagcacttttcggcaggaacttgggggcggcggccaccgagcatctggcgccccgcggcgtagcac

SEQ ID NO: 50827 - DNA, 430 bp, Mus musculus
  source 1..430: mol_type = other DNA
cagaaactctaaaagtttgtggtagttttccagaaaatttatctagatggacaaattccaggacataattacaaaagtgttcggaatggtttgagccctttccatgtcagagtgggaggacttcgctgccacttgacacactgtcaagtatttgaccagacactgatttttaaaaagcattcagagctatgcaagtctgagggctttcttaatacaaactttttcctagtgaaggaggaaaggagtgaagaagtgcccctttcattctttctgaggtaacgtctttttaaaatataagatgaactatatatatgtctacacctactcccactgtgtctgatgtcacagacagtccagggtggcgcctgaaaggagagccccttgctcccgcagctttcccaacaaaccggggcaggatgggagttcctgt

SEQ ID NO: 50828 - DNA, 389 bp, Mus musculus
  source 1..389: mol_type = other DNA
aaatgcgggtttcattttgaagatcaagcagaaactctaaaagtttgtggtagttttccagaaaatttatctagatggacaaattccaggacataattacaaaagtgttcggaatggtttgagccctttccatgtcagagtgggaggacttcgctgccacttgacacactgtcaagtatttgaccagacactgatttttaaaaagcattcagagctatgcaagtctgagggctttcttaatacaaactttttcctagtgaaggaggaaaggagtgaagaagtgcccctttcattctttctgaggtaacgtctttttaaaatataagatgaactatatatatgtctacacctactcccactgtgtctgatgtcacagacagtccagggtg

SEQ ID NO: 50829 - DNA, 281 bp, Mus musculus
  source 1..281: mol_type = other DNA
catatttctttgcaggattaaaaaaaaatctaggcagtgggactagagagatggctcattggttagagtcctctctctctctctctctcacacacacacacacacacaaatgcgggtttcattttgaagatcaagcagaaactctaaaagtttgtggtagttttccagaaaatttatctagatggacaaattccaggacataattacaaaagtgttcggaatggtttgagccctttccatgtcagagtgggaggacttcgctgccacttgacacactgtca

SEQ ID NO: 50830 - DNA, 315 bp, Mus musculus
  source 1..315: mol_type = other DNA
tcttacagaaaattagagagattccttttcgttaaagagtgcctgccacatctgccaggcctgagcacgcatgcggcctcgattattatttgttagtagaaattagaatcatcaaggatttctgatactataaaataatgctggcaatgatatatgcttggaacaaaactattaaatgtgtgatcccttttgctcactgtgggtgagcgagcacctctggcagcacaggaggcccgcgtgcgagcagcaggacccacctctgtgcgcagggtgcatctgctctttccgggagcgggacgggactacagttcccag

SEQ ID NO: 50831 - DNA, 438 bp, Mus musculus
  source 1..438: mol_type = other DNA
cacagcctgtaacttaaaaaaaaaaaaaaaaatcttctctacctgtttagaaattcctgtgaagtatttgagggcttagaatcattccattgcttccatgtcacacaggttgaaaatgatctctaaattccatttcatattacattcacactttaaagtaacatttttgaaatttgtttttttgttttgttttttacaactgaaacaaacagggaactataacagatttcttcaaacaagaataacgtaattatatcaggttataatgctagtttagttagatccttagttacatttaaacaaaacagaagaacacgtattaaagttcatcaactccgtagtactgattttgttagatctcggctaaatcaaagcctttgactatggttgaccacaaggcccctcggcccagggccgctttggcccggcctggggtgg

SEQ ID NO: 50832 - DNA, 704 bp, Mus musculus
  source 1..704: mol_type = other DNA
aaagaatttaaagtttaaataatcatataaatgtaaaacctttattgaactcaatataaaacactgattcaccgtgacaatattttaaagttcacaacagatatttaacatatacgtttcaatgtgttcactgtgtgcagatattttgttactaagacacgtaattctatagaaatctgtcaatcaaaatatgctaaaaatcaatgaagaaattattttaaaagaaaatgatcatagtatataaactttttcaatctttttggaagctacaattttatctaatcttaaaaattaatttaaccttcattttaacaacccacagtaattttagctggaaaatgtaatcaagacaaaaaatttttcaatctcattctaattctatcaagttttaaagactagccattaaatatttgtagggcaatttatttttaaacattttaatgaccacagaatataatattttttggaaaatcagttactgtcaaaacagtgtttcaatattgaaaaataaaaatcacatatgttgaccataaatttgtatagctgattcatcaagacaatacccatctgtgcaatctatgtatggatttctctcatattacaaaacataccatgacatatttcagggaacagctaaggtaacagggccatacctgttcctgcaactagagctagagaataagacatgttctgtctgcaatatc

SEQ ID NO: 50833 - DNA, 440 bp, Mus musculus
  source 1..440: mol_type = other DNA
taatatacatatggccccagctgcaggcacaacctagttaacaaaacatcttttaagttatttcaggaaagtgtgattgccctatgaagtgtacaatgctcagacatgcctgcaggagtctttacatgacttttaaaggtcataggcttgtatataaaactttagaaagtcttgactttggagccacagtggtgttcccgtaatttttgattccctaagataacaagactcatggttttcttctgagatattcttcattaatatatgtcctttctgtagtaatatcatgaataaagtcaccattcaaggccagcctggtctacaaagtgagagcttggccagggctacatagagaagccaaaacaaaaaaaaaagcacagtgttttgatttacactgttgagagtccaactgaagttgaaaaatcaataggcttttgaaa

SEQ ID NO: 50834 - DNA, 503 bp, Mus musculus
  source 1..503: mol_type = other DNA
gatgtagaaaaaaacaaagatttttttattattaattactgtcatatatgatttcaaggatactcagttgctaatccattacctaataaataaccaactgtgtaaaaacatgcatgtatgcaaaacactttggcactaagacttattttcaggcattctgatatatctgaatgtgtagacaaatatatgaagtctaaacaaaatggttggtactaaaattgttaccagcactcagccaggcaaaaattgttaagttaataacaatcgtatacatattaaagccatatacaatggtacaagcactctctcaagaagcatgttcttgtccaaatttatagatttccctctaacttcagatttgaaggtagcaactataaaaagcacattcacgttctgtgacctttaggttcatggagccagaagtccggggcggggccgcgtctcgtgggcggggtcgcgtctcgtgggcggggccgcgtctcgggagcccgccctggacgtga

SEQ ID NO: 50835 - DNA, 379 bp, Mus musculus
  source 1..379: mol_type = other DNA
cttactccacattaggagtactaagcaagtatggtagttgaacatactaactggtaaaaccaaagtgatatgaagagatgaaacttttcaaatacaagtttgtaaaagtaaaaataaataaaataaaatgtagatctttaattgttgcattctaaaaaactttcaattagcacaaattatttctattgctataaactccaagtgattttaagaacggtaatctggtgttagttaatatttcctttgccaaataatgtttctgtttttaaatactgactggtttttgcagagctcgctcgctcgctctcaggcctagctgagcctaggaaaggctctgtaccagcgatgcgcgcgcagctaaggccgccccgcacgcctc

SEQ ID NO: 50836 - DNA, 295 bp, Mus musculus
  source 1..295: mol_type = other DNA
gtcattaaagaaatggggttaaaattcctcactgttttttaattataaactaatgaatacaaagcattaccagctttggagacccaaaaacctgggattctgatcctgagagaacatgctagttgactcacagatatatataagaaaaatttttaaccagggtatacatttttttgattctggccaatcctccaaagcttacatgaatttaagtttacaagaagagatgttttcattacttttgtttgtaatctgtactgaacattgtagaaaatgaagaagactggtccagcct

SEQ ID NO: 50837 - DNA, 601 bp, Mus musculus
  source 1..601: mol_type = other DNA
attggctgcacccgagccacagctgctgtcagacgggagatcgctcggctccaccgagctcagcagagctctagggccctgccctccacgcacccctctcggccggcagcagggcgacagcttggagactgcaggtggcaacaccacttcccatcagctagtcccgtgcctcggcccagggcggggtcccaccaagtggagcaaggagagcgcaccggcccccgcgggctgccttggacttgaccacgcactgctcagaccttgggctgctcccagcttgctatgaagatgctaatgacctccatggcgaagtcaccacgcgccaggcaccagtagacttccagcgctcagtgactccagaacgggagaggtggccacaaacctcggtggccaagtttgggaggctagcactcagacacgtcagggctgactcgccaagctgtgccccggggccaggagcgctgacctgcaaccctcaccctttctggtagcagaaatgtctccaagggaaaggcgaggggggcggcgcagatgccgccgagtcggtggtggctactcagtcaagaggctgagtgctcagtccgcccctcccagggaccac

SEQ ID NO: 50838 - DNA, 452 bp, Mus musculus
  source 1..452: mol_type = other DNA
tcctttaaactataaacaaacatatgtgtttgtttcaaagtttatggtcgtgattgtttttaaacacaaaatcaatcctgcaattatcttggtgcacaataagctgttccagcagcagtttctctgctctcacacagtattgtgaaggaggaggaaattcaaagaattaaatctagattttacttgggctatctacagtgggggtggcggggtactaggaaagaactcccattcccaggtttccttcctggtagaaactgaatttctatttctatattggtaagatagataaaaaaatcagtactaaaagtaaggtggaatgttcaactcctctttgtgagctaagatgtaaacatcgcatagttttaaaatctgcaaacaaacctttgtctagctacaagagcatttttcaccaatttcacaaggacttcctgttaccggcagaacctgat

SEQ ID NO: 50839 - DNA, 339 bp, Mus musculus
  source 1..339: mol_type = other DNA
gacatttctggtttgttaccagagaactaacaatgtcaacactagggccttataataaatcagcctatttaaaactgttagaagacgtagagctgttggaaagctctttccagacattctttcagaggctgatagatggagacctgagcatgtctggaaatatctgcatccctgtcgagccctcagcacatgcccgcagtctcagtggggcgatttaatttttgtaaaccagcaatgcctgggaagggtgactctgcaccccagcagctccggagtccccagagagctttggcgacctgagtctcccgcgagatttttgtctacaatctcgcgagaccg

SEQ ID NO: 50840 - DNA, 336 bp, Mus musculus
  source 1..336: mol_type = other DNA
cattcaaaaaaatcaatctatgttttaattggacaaaaaaggattaatatactcatatcgatagcatctatagagtctcatgtaacctcttatctctgttacagatgatatgactaggacttaaaagtgtaagctcttttcttaaagttataaaacagtgttaagagcaagttctatgttttcagaggaactaaagtccaagttggcttcagtttaagttgacatcctgactggctggcagtctcctttgaactttctaccagtcaccgcttcccctcccgggctgggggctgggagcgggcggtcccctccgcccctggctgctccgcccgcccg

SEQ ID NO: 50841 - DNA, 485 bp, Mus musculus
  source 1..485: mol_type = other DNA
aactaactctctctcttttagaatttgaatggataaaagtggtggggaatttgccattttcctcaataaatgcattgtaaatagtcataaaacacttctttaaaaataaagcattgcacaacattcacagtcttttcaaaaatcaaatgcccatgattttacttcttatctttgagtggcaactatacaatgttcatatttattttgtaatcgtaacaccttcttacaagaaatataattaccattcacatatttttatgtaatagctatccgattaaaatagcattctcatttgaactgttaagacaacttagcaaacgagttttcctagtttcagaccgtcagaggtctttaggtctcatctaaggtactgccaaggaaccctgtttccgccctttgacagggggcggggagcaaggagtggccgctcagaagcccgggacgtgttccgagggcgggtcttccgagcttcgggaacgtcagca

SEQ ID NO: 50842 - DNA, 459 bp, Mus musculus
  source 1..459: mol_type = other DNA
tcaaagataattcaaaagagatcttaaagtagaaagtccaaggacattgttctctaggaaatactggatttttcagcgttaaaagagcagccttcctaggactttcgatttatattgcaaatccagcaaccatccgatggactgtgacctctctgtttcagctgagattgctgtatcaaatgcctttacagtctacttttatcttgttgaatcactaagaggactgtgaacacacagaacacagtaaacggattaattgcaatggtctttgtcgttctacaataattgaatgaacgtcttccacttttaaaaacaatactacttttttgaacattagtttcgggatctttgacggctgcgttcttccgcagctccgtggaacggagctggctgccagccatggggctgccctgctcttcttcagcgcccgctggcgacggcactaggacccagagaagt

SEQ ID NO: 50843 - DNA, 379 bp, Mus musculus
  source 1..379: mol_type = other DNA
cgcaactctaatagaaatccagtttctccttccaccagccactaattcaaatctaatggcaggcaggtcctgcggcaccctgcccctccagctccacattagatgcaaatctgaagtcaccagctggcaattgaggttcaactgagattcaattaattgggttaaattaattatctagctatctcaaagttatagtccttttaaaacctagagcgtttcaaagtgtagtctaatctttgtccatcaggcacgcgcgcgcatgcgccgcactgttcgtttctagcccagcctcgagtggaaggtctttctgagctagcacttccgcccagagaggggctggaatctccgagacccttccggcgcttgcgagggtgaaagg

SEQ ID NO: 50844 - DNA, 406 bp, Mus musculus
  source 1..406: mol_type = other DNA
tatatctctgtgatagggttttcccagaaagataaatctaccaactctaaccattggacagtgggtagcccaagcctgcttaaattttgcaaaatgtctacctcacattccaaggtcaagatagattttggcagttcctgttttattccaagatttttttcaagaaatgcctactttgtgaaaccttagaggttttaagacggaaacaagatcgttttctttaagctatttgcagaaaggtcatttccagatttcccgaacagataatctccaaggtatcagtggagttaaaaggacgggactttttccctccccctcccttctccaagcatcagtccaaggggagggagggatccccggggcgtcggccctcgagtggactggcgtctggaacccgccctagagc

SEQ ID NO: 50845 - DNA, 674 bp, Mus musculus
  source 1..674: mol_type = other DNA
gcccagccagccccacgccagctcggctcgcacgccccggggcgggtggcccggcggcccgcgcgctccgcaggcccgaggctccggtgggggcggggaaggcgggcgcgggccgccggacgtctagacagcctcctcccgccgcgccggccgaggtggcgccccggcgccgcgaccccgcctgcgggccggggccggggccgaggccgcgtcccagccgccctcggagggccccggagaagtccgccgcaccgccgccgactccgtggctgtccccggggagggggcggcgggcgccggccgaggccgtcgctgtcaggctggcccggctcggccccgcccccggttccctcgcccggcccgaaggcctgggctcgccgcccgcaccaacggccaagcccccagctcttcgggaccgtaggagcgggccgccgttaggggaaggggatgaaggagatcccgttgcggccgccgctgcttccgccgctgcttcagccgctgctcctgccgctgccaccgccgtcgccgccgcccgagcgagctccgccgcggccgccgtgtcccctgccgcgccccgtcctccggcgcgccctatggcagggctcgtaggcggtcctcagcaaccgccgagtagtgtggaccgcgggcatgcctatagccctgtccggctgggg

SEQ ID NO: 50846 - DNA, 529 bp, Mus musculus
  source 1..529: mol_type = other DNA
ggggtgctttccagttgaccgtccagccccgtcgtccccatcgccgagctcggagcggtgcagagaggggaccggggcttcccagactccctctccgtcccgccggaggaccggtcccggacacgacgcagagacctgggccagcaggccaggagcgggagcccagtgacaagtcggagcggccgacgggcgcctcacctgacagaagcgtcggcagtaatcccggctgctgatcccgacgccgccgccacagccgccgccgccggccccccctctgccgtcgcccgcagctaggagccccactgggcccgggggggactccacaatggccacgagctcttctccgaggcgctcggcctcttggaggctctcgccgcccagcgcgtacccagcccctgcgccgccgccgccgccgccgctgccgccgccgctgcctcagctccccagccggacagggctataggcatgcccgcggtccacactactcggcggttgctgaggaccgcctacgagccctgccatagggcgc

SEQ ID NO: 50847 - DNA, 422 bp, Mus musculus
  source 1..422: mol_type = other DNA
tttgtaatcccatgaaaggcattgcttgttcaagacataattatgattgtaaatagaaataatacattaatcaggaagatgtatacatagtcatgaatgattatgatttccatatttattttatacagtcaagaacttaaatgactgtcctttttttggtattaaatatcaaccaagtgctatgtagcaatttcatagattcactgtgcagccagcagcctttcttgttccaagtcaggagcattaaacaatagtgatcacctgggacaagcctagcagggcatcccctaaggcctttgcgcttgggagtcctactgtcaataggtttcactcttgcccgagccaacctaggtcgagggcaccgctgcggcttcagaggcgcagtgcgcaggcgtgctcgcagactgcgcacgcgccgccta

SEQ ID NO: 50848 - DNA, 540 bp, Mus musculus
  source 1..540: mol_type = other DNA
taatgtccaacagataactaaaattcaaattttattttttttcatatttatcaaacaatttttttgcacgtgtgatctaagtgttgtacatgacatatttgaaggccactcagtacacattgaatactttgtcagtatataggcatattaacatgcaagtgtcatgtacttaatattacaatatgcattttgttttgtgaaaatgttcatgatacaagtagatttaataattctttgcagcacagaatatatttgagtgctgtcattaagtatacccttccaaaagatatggatttcatgtcatataaatagaccactttatttttgctggacactgttttcagagataagtctttaaatttttaacatggcaaacttgttccaaggttaagctaaacaactgattcgtcaattgcatcattgaatcaatagtttgtataaagataaaaatgttacatatttataaggagcaatattactagctttgaaaagcttctgcgagaaagataacaactgttaacattttgtacttgtctttaa

SEQ ID NO: 50849 - DNA, 539 bp, Mus musculus
  source 1..539: mol_type = other DNA
ttcaagccagaaagatatatatacatcgagatgttgcaaggaaacaactagcaccatcggagttgagtccaggccgccaggtgactgggagccgcatcactgggcccggaggcggagagggctgcaaacttcgctccaatccgcagccgccctccccagggtccccctgctgggcgacccgcccgctgtggacgagagctggggaggcaagcaccccgcctctcctcgcccagccgcccgcgctagtgataggacgagtccctgctgctctcctggagcggccctagcccggactgggtagcagctgctgctggtactgcggagtacgctcctgtctcggatgcggttgcctgagcctgagcccagcgctgtcatgctcctgccgcggggcgggctgcagcgtcgtcccgtcgctatataagcgcgagcagagggggaggtgcccgcgcatgggccgccgctgattgccaacccctcccgagctcgctcccggcgcggagcccgaggccgccgaggacccgccttagccgcagtagcag

SEQ ID NO: 50850 - DNA, 323 bp, Mus musculus
  source 1..323: mol_type = other DNA
atgtggtatatttacagaatggagtactactcagtgattaaaaacaatgacttcatacaattcgcaggcaattggaaggaaactaaatattatcctgaacagacatgcatgtatttactgataagtggatatggtttggagagatgtgccaaggttggtgtcaccagggccatccaaggactgccctgtgtctgcagaaaccaaacagacactgttcctgtggtcaagaggcattgcgacaggaatctcaagtgacggttctttgggaggtccggccagcaactgacagttggaaccaactgagctcacggaactccttgggg

SEQ ID NO: 50851 - DNA, 507 bp, Mus musculus
  source 1..507: mol_type = other DNA
gcattttaaaagaaattttataagattccctgttatttttaattaggaaaaatcctcttacatggtaagagaactattactatcatctttttcagttgagaaggcttcagaaatctatgggatttgaaccggatctcagtccctatacatggtggtatacgtaaactttttgaagaaaaaacaacaacaacaacaacaaagtgatttttttcctttacttctccaagttcttgcaggcaggtaggtgcagctggtgagtgggcaggtgaagccaccatctgctctaggagtccaaatgctcagaagaacttccagaacctggtggggggggggggggaagatccagctaaccccgccccctcgcggtggcgattggctgagctcagcacctgttcatgaacagggctgtcttccctgcaagttagcacgtggccacctttaaggaggtgagggtggagcctatccctggccagggtaggggcggggccttcgcggcgctgagcttgc

SEQ ID NO: 50852 - DNA, 420 bp, Mus musculus
  source 1..420: mol_type = other DNA
gatagctgtgtcaacaactgcaatttgtagaatatggttttcatcgtgtcataggcaataataacaaaaaagaaaagaatttgtgaaaacttgtctgtcaaatatcccaggcatgtttcatctcgggcctaattagcttactcatgaagccccattttttttttcttcagaagagagaataaagttagtatggccacaggtacctgataccctctgagtataatgaagtctccaagacctaaagagaatatccatccactactatattttagataatttacactttcctaaagcctctttgctgagaaagcaaataagtttgtttgtttgtttgttaacttctttggaagtttactgcaattccctaaattgaaatctcacctgagggcgcagttgggcgctccaggtcccgagccgggc

SEQ ID NO: 50853 - DNA, 495 bp, Mus musculus
  source 1..495: mol_type = other DNA
ttttacatttccagatttcaactgagaaaattatactcaattttgaggtgcaaagtaacttgcagcctgtgtcaaaatctgtattcttaaaaaaaaatttttttgtatgtctgtgtaatatttgaaagttggtttcctctttccctgggaatataattccagttcatggcatcaatgattaagcaggagagtgcagtccactttatctcatcaaagacagtttggttggtgaaacacaaatgcctgataaccaggaaagttctgggacctggctggctatccatgcttatctatgcaaaaatctttaaagactctcttggttaaactcttgaaatgacattaagattctaaagtcgacttttaagggactggtgagacccgcctcccggtggccagccagcacagttcagggctccaggggccggccccgtgagtgggcgggggcccgcgctgaggacgtgtgtcccgggctcaccctggcccgctccgcagggc

SEQ ID NO: 50854 - DNA, 524 bp, Mus musculus
  source 1..524: mol_type = other DNA
taaataaaacattccatgttttactgtattattgaaataattccaagaaacatattttctaaaaacaagttttgttttgaacctatcttgctttctcaacattcttgcctggaaagaaaatagaaattaaagagaaaactagcaatgcctttaaaatgtttttttttttttaatattaaaaccaaagagatttttttttcttttcaaattttagctccaagagacaagcaagaactcaagtctctgaaaggttaggcctaccttctctgactgaggccagaccaggctgtcctcgttttggatgcataatgacatgcataaaaacccaggcagtttcatgggtgtggattttgttattgatctcaggtctgtgaagaactcagtttataatcaaaatgatcataaaacacctaaaattctgaggttaaggaatgaagacatctacaattaggtttctcattagacacgctctcttaacacacacagactgcttcaccttttccagccgggggaggagcaagagt

SEQ ID NO: 50855 - DNA, 444 bp, Mus musculus
  source 1..444: mol_type = other DNA
gcggtaagatgaaatcttaaagtagttttcatttgcatctcctcaatcatttccatttcttgagagaggaattttctgatcagtcaaccgagcagaagtacatctcctgaattcaaaatgaatctgaatgatcatttatacacagtgttttagagcccacagaaaaattacctatctcggtattacttaaaggctaaataaactttaattttagtcttttcttgtatcctaccaatttaactctttggaagcaaattaattttttaagttagtcaatctgaatatcaacttcctagtcattgtatttccaacgttgcttaaaaaaaaaaaactgatgccctcaggtcagtaaggggtcccgcgggacggtgggcgtgacttcacgccccgcccctggcgcgcgcccgcctcgggctccgctgcccaggcggagccgcgcagtaa

SEQ ID NO: 50856 - DNA, 445 bp, Mus musculus
  source 1..445: mol_type = other DNA
ccaaaataacggacctgtccaggaagacaattctggccatttatgacataattaaaacgaaaagtagaatgtatctttccatattagttggtaatagcatatgtgaatgttaatattagatttgaaaatatcttggataatttactgccatcgggctggcattgcatttaatgactgcaaggatatttgaccagaggtggggtctccggtaggactgccccactgtggaatgctagaatttgaattccccgcctgcctggcaacgcaacctggacagtccagaactgcagtggtttgatgaatgacaaactctgctcccacaacaaagcctggtttgttgggccttcgtgcgtggggaggccgagtcttccctcactggccttcctccggctaattcggagccgacggactaccccaggaggctgcgcgacagccggcgactagg

SEQ ID NO: 50857 - DNA, 553 bp, Mus musculus
  source 1..553: mol_type = other DNA
ggctttcagcaaaacctttaagacatattggggctattccaggcccacttagtagacactggatgccttgtctggagagaggactgaggtacagagtacgtataacaatgatatgcttgctttttcaattacagttcttttaatctataccctattacggtagctttagggaggattaatattatttaacttcaaattgatcgtcatgtagaaatatacaattatgtattgagaaagatacagacatatgtcacatttaaaaagtgatgatgtaagtgtattatataacctcaaataataaaatattataaaaatataaaatggaattctttaaatagtctcaaacttttaaaaatccacaatattctgtttgatttcatttaaaaggttcagatcttttttaatgtgttaaattcttttacataaactgagaaaataagttttgttttccaaaccataattaccgtagccatgtcaaaggtgtgagctaagaattatatcatagaatacgaccagaggaggaagtgtcacatcagacacttggtatcacgga

SEQ ID NO: 50858 - DNA, 396 bp, Mus musculus
  source 1..396: mol_type = other DNA
ctgcaggaaacccaagtttccctgcattgccaagagctgctttaagagaaaccaggttcctgggtcctgcgcctggggtaggattaaggtgccccgacgcccctgtggtgcccccagcgtttgccccggcacgggtgacatgggcgatcgcctggcccctagcggggaatctgtccaggcggctggctggacggggctgggaagccagggcgccggctcgggaagcacagcaggacccccacccggagcaccggcgaggaggcctgcagacgcccggtgggctccccggctccgccgagcctccgggtgcgcgctcggcccgggtgacagacccggccgccgcgaagtcggcggcggagggaggagcgcggctgcggcgggcgggcggcgagcgag

SEQ ID NO: 50859 - DNA, 463 bp, Mus musculus
  source 1..463: mol_type = other DNA
ttaatgctgcctttactaatttgctttaagcagatagtattttaaaatgcaccatcatcgccattaaggaaaatatttcctgaatatagctttattaagaattgatttgaaaaattgcctttactttaaagagtttttcatttgaaaaatccgaaaaatagctatagagctattatataacagtaaagaatacttccaaatgctaccgaaattcttaaggatataaagcttcatccacaaaattgtcttagtaagtattttagccttttttttttttttttaatgtcaaacaaaaacaacttctgcaaaagtcttcccgcaggtaattcttttcatgactagagtcacaaggcgaggaagagatcatggtttcttatttttctctcctcaaatttagaggcgggttcagcgagaccaggctgcaggaaacccaagtttccctgcattgccaagagctgcttta

SEQ ID NO: 50860 - DNA, 494 bp, Mus musculus
  source 1..494: mol_type = other DNA
tgaatatgaactcgtaccctactacattacatgattgatattcggtgaaaaattatatgaaatacaaatcaagtgtttactcatgatataatctgaggatttctcagggcataaaaattctaccatcgtgaattaattaataatgagtgaatatcaaaagagtattatgtgaagaaatctggcatagaattaatgcaccagtctttggtacaatctactttttcaattgagaaaagaacaatatttctaatattcactattatctattttgtgcacacatgtggaccaagaaactgttttctgtcttaactatacatttgactttgtttagaaaggcttaagatctatttctgcacactgggagcctactaggttgccaaagatatcttaagacgtttaaaaggataagagcttagttcttagtgtaaactcgaagttttgaaaatgacaaaggctcaaatctaggataatctagaataattctatgacgtcat

SEQ ID NO: 50861 - DNA, 410 bp, Mus musculus
  source 1..410: mol_type = other DNA
tttctcatactgccattctgtttatgaatatgtaaatataacgtgcacagaaatagctatagtatactgattttgtatactcacagaatatttaattttttaagcagtcaaattagtgctgatatggaaatgcgcaaatgcttaatgaacatctaagcctaaccgtggagagacatgtacattatttattaggtccttaaatacttttcctttgaagcagaaaatgatgtctgatttttattcctgaagtaagcaagcatgttcgtgcatattagtgcaagcggtgcccctagtaattagattggtgtaatcacagtggaatgaagacagccacactgataatttcacagtgaatattaaaccctgctgcagaaaggagcctgccgattggctactgtctgcagcacata

SEQ ID NO: 50862 - DNA, 520 bp, Mus musculus
  source 1..520: mol_type = other DNA
gatacttccttgtcacaaatttgataatgatacctatccttgtaaagtgtttttgaagactacgaagatgtaatgcataaaacgcagatagagttttgcaatattacattttttcttatgaattcccagttaaaaatactaatatagttctgaaaataagagaattcgtgaagttatctcacgcaggctagtagctgatagttgcatcaaaattaattaattaaaattaattttacattaaaattctttaaaagtctcaaggaaaaccgcttagccatgttttccagcaggcacataatataaagaaaacatgttactattctgtcctgaatgtttgatttaatgtgaaaaagtattgttttaaattcactgagtcaagcagcacatttactattaaaaaatatttctagaatgcagtgtctgctcggcttaggttatctaagctgtaataagacaccccacacacttatgctgtgtgacctcgggttgccttctgactgcagcctgagttccccggagc

SEQ ID NO: 50863 - DNA, 571 bp, Mus musculus
  source 1..571: mol_type = other DNA
agtgactgtcacacattgaaataaacacagaatgtcagtcctgatgtagaaggacaacctgcaggatgggcggttctggccgtccagcccgcgcgctgagaggagcttagacggagggcggggcccaccagggggcggggcagcaacacagcccctccttccgctcccgcgggtcacaatgtagggttacgcgaggcggagtcgcggcggccggaggacagcgccattccgggtggccgctccctccgtccgcttgccgccggcccgcagtggtccccccggagcggtcaggcgaagctgagtgcgaacgcgtgacgcggcccggcttgatcgtgctctccgtcgcctgcgcccatgggccgggccgccgcggctcagcggcgctgaggatcggggcgcagaggacctgaggcggccgcggtggcgctctccggtagcgtctcgccgcttgcccgcggggcccgcgttcgcccgccgccatcgccttcgcgcccggctggcgggggcgccgtcctcccgggccgtccgcgtcgctgccccgggcccggtagagcgcgacaggcggggccgc

SEQ ID NO: 50864 - DNA, 288 bp, Mus musculus
  source 1..288: mol_type = other DNA
tgaaggaacgttttccatcttggatggtggaaggtgttcaacatgttagaaaactttaaattaacactcttatttttcagagattataaaaagaaaaatgaggtgcagggttaaatttttctttccactgataacacaggccatgtgggtcagctgctgtagcctgatttgaccctcctctctttgctatttaaaaaaagaaagaaagaaagaaaagaggaaaaaatagctgtgctcctgcttctttcgttctaagataaattctcccggagacaacctctcccagtg

SEQ ID NO: 50865 - DNA, 519 bp, Mus musculus
  source 1..519: mol_type = other DNA
atggatttgaaaactactttttaatcctcagaagacctttactgggaatatgcattctgagagtccagcctttaaaatatttacactaagatattaattttatttttatcccatgcccattgacataaacccgtagatccgatcttgtggatctgacaaagcactatgtaagtgttgctcatagcatttccattgttctcatgtcttacaaggcaagttttactttcaaaaggttggtgtttttaaatagctggctttgagcaaactctgctgaaactttggcacactttaatgtgtcttatctatttcaacaacatagtaaagtctataactagattattatgttacagttgatcaaaatcaagttattctacttttaaatttgcaaggagatgttagaagacacttcatgtgacctatactgtaaactcaccagattagggtagtcctgtaagctacaactgaagttgatttgtaaactgctagaatattctatctacaaccttgccaagcccttag

SEQ ID NO: 50866 - DNA, 322 bp, Mus musculus
  source 1..322: mol_type = other DNA
ttgtgaatttcaacatttctaacagttaaaaaaaataaacctgccgcctcaatttataggtcgttatacactcctcgcccttggaaacacgggtgccaggaggtccccacccctgaccacaggatgcggtgactgctggctagcaattccggcctggagctgggcgtgactgtttcagcagtgagactggctcgctgcttccctagcgcaagcaggtggtgggacgcgggctgatcccagtttccatggcaaccccagggcgccaacactgtgggctcttaggggctcccgggtgtggggcggggcgcagaggtgccttcgc

SEQ ID NO: 50867 - DNA, 475 bp, Mus musculus
  source 1..475: mol_type = other DNA
ctgcatttgtaaaaacgccacatggggtctttgagtcagttcaagctccactaaactgtgtttcacttgtggcctaggcaaggctacataattcgaagaaaagatgctctgcttctagaattatacctaaatcgggatatctgaattatcaacttttatctcattcagaaagtgaaacagcaatacactccccacgcgtgtgtttagccgtgggcccattcctgcaatccgcaagtggctggagtggcgggccggacgggtccatgtgcgccacgcggaggggagcgagatgctctccgcggaggcggcgcacgggggcgcggggcggcgcggggcgggcggagggcggctacactccctgcgctagggtggccacgtggggccctggggctgtgggctggcccggccgctctccccgtgggcggctcggggtggcgcaggcggcccgggcggggcggagcgcgctgctgtctgc

SEQ ID NO: 50868 - DNA, 477 bp, Mus musculus
  source 1..477: mol_type = other DNA
gaacagattccactctgctcttttcaggattgagactgtgtattttcaaaagtattgaactatataatgtaattattcaaagtaaaggatctttttttgttttcttactacatgaaaatatttgctgtctgaatagtttgcatatttaaagagaaaaatcaacattaataggtattaaattatgacatattcaaagtttttgtttaaatcttatctgtaataatttaaatgagagtttgtgatatataaaacttcaatagaagcaaaatatcaattagggccccattaactggcatataatccttttttagtgtaatagaagaaaaatctgcaaggagcatattttaacccatttttgtctccttctttggatagaatggtgtgtttcaattagtatttagaagattaaaaataaatgaaccggaagaagaattctcctgcatcacacgagattgtgaggtattttagtaacatcac

SEQ ID NO: 50869 - DNA, 420 bp, Mus musculus
  source 1..420: mol_type = other DNA
gaacattttcaggtttcctattatggactatgtgtaaactgtcattatgagaactctccatacatattccttaaagtgagacttacttttttctctgtatagccctggctgtcctggaagaccaggctggcttttaatggaatccatagaccactgatggatacgttcagagatcgtgaagttctcaacaattcagattgcaaacactgagactgaaaattcttttcaaattacttctatggcaatttagtcaagcaacctgcttggaaataatctatttgcagaacaacctcgtggacatttatctccgagaaaaccaaacttttgcccgagtttaatagcaaagctgtcacattttacacaaattcttttcaaagtggctccatgattactagctaggggttggaaccccaggctctg

SEQ ID NO: 50870 - DNA, 734 bp, Mus musculus
  source 1..734: mol_type = other DNA
ctaacatagtaaaaagtatatgtattactccaaaatagatcagatggaaatatttgattgaataattgattgattgattgattgattgattgattgatttatatcattattttcaagttaagaaagttccaactgtacattccactctaattataagaaaagtttcatttttcttggaaaacacaggtttatgattattgctatatactttttttgacaaatttacgatgctaaactacaagaataaatgaacaaggtcttctctacctagacattttcttaaaatagaaaccaacactctttttttatctcaaaataattgctcaagtaatgtagagtagtaagtggactttcctttaagcacaatcaataccttacagtgcaaaaacttcaagtgtgacatcataaagtttacaacacttgtgtttgtttcaattaggtgtttatgtacacatgcatacacatgagtatgagtagaataagatactatgcacctatactatacatgtgtatatatatactatacatctatgtattttgtggcttagtttttacctgtctacagaactatgctaatgataagaaccttagtgtttggagcactcctacaaatattaagtgcatttccctaatgaccaatatgtctatcatcattttcatggtcgttcatgcgattgtaatttacagttgttattgtcttaaagattaactactccttttaaagatactgaatg

SEQ ID NO: 50871 - DNA, 463 bp, Mus musculus
  source 1..463: mol_type = other DNA
tcactctgatcggggcagagaccagatcctggggccagagattctggttctaaagtgacagtttatggatcaaccccagactttggttgcatgaaccccagctcaggtcagacactgacaaggaaattcagcagcgcccccctttagggaggggatccactcatcccaatgaattgggacctaaagatgcactgcatgcaggccaggccagggttaagtcctaggatagacacagacggccacacctgcggggtcgcaaaagagccagagggtgctggtgtccaggcgtccctgttccccgtgagcatgcaccagcccgggactcctgggctcgaacccgtggctggggctccactgcggacgaatcccggggccgcgcgtgcctggctcgcagggcgagcgcgcggagggatccgccggggccgcgcctccccgccccgtcccgcccccgcctcctcccgcc

SEQ ID NO: 50872 - DNA, 550 bp, Mus musculus
  source 1..550: mol_type = other DNA
acaatattgaatggttgaatccaaatttatacttacatgtcttgccttaaagatgaggaaaggtcttaacactttccctatgcaattgtaaacatgtattatttgtggtggcaaaattcctgactaaatttataaaactatattggttcattggttcagctttgcagaagtaaagaatgctgctctggcaccacagtttagcgtttttaccaaccgtcataacaaatatttgctgagctgccaagtttgcgtttctgggatatccagggacgagacacagattcccggttactccgtgcagtcgtgcctagatcattcggaaaagagttctaggacgttctttgcaaaatggtgaaccgggttcagccccactgcagggcgtggctggccagacggaaccctcgtgagacaaaggcgcctgtgtgactcctctgtccaatgtccccgagccaagccaaggagaggcgcgcatgcgcccccgcgtggctcggcgcgctcctagcatctacggaacctccgccgcgggttccgcgtttccgggggaagaggg

SEQ ID NO: 50873 - DNA, 464 bp, Mus musculus
  source 1..464: mol_type = other DNA
gcgcccggggctgtgcgctcggccagcgcgccgagcctggaccgcgcccgtgcgacgggcgactccgccgcgtcccgcaacgcggcccgggccacgccgctccccgcgcccctcggccgcggggggggacaagccccggaaccaggccgcccgcgcgggcccgcgctccccgccagcccgcgtccgcaacagctccggaattcgtcccgtggccctagcccgcgcttccacagccggctgggaacggcggcggcgcgggctccaggtacagcgcctctccgggcgagccgcgccgctcccgcgagtagcagggtaaggtcccggggcccttcccgtggaatcggcgctccccgggcctggcccagcaggctgcgcggcccgaaacgcccgcgacgacggggctcacgaggcacaaacgccccccagcccggtcgcagactcccttcgaggcgcttcctgtccgg

SEQ ID NO: 50874 - DNA, 412 bp, Mus musculus
  source 1..412: mol_type = other DNA
agctctgcctaagtatgctggctcaattctttgtaagtggtccaccactaaatcagccatcctctacacataattatttattatttagctttatttaaaacgattttaaaaaatgtcttcacctggaggaaatgtgaaaatcgcctttgcaagtgcacgcttccgaagtgcgggtcaattttaaagcacgcactggagcattcataatggatttcccttttaaaagggcagctgtagagttttaacatgtggaaaactccacatccccaccccccctttctagaggcaggggctgagctcatgcccctatactttactagatagaaattttccaaaaaatatctcgcccccagctcctcgccctggggacagctggcagcctagcgcgggactagcggggggccgacctgca

SEQ ID NO: 50875 - DNA, 367 bp, Mus musculus
  source 1..367: mol_type = other DNA
ctacacataattatttattatttagctttatttaaaacgattttaaaaaatgtcttcacctggaggaaatgtgaaaatcgcctttgcaagtgcacgcttccgaagtgcgggtcaattttaaagcacgcactggagcattcataatggatttcccttttaaaagggcagctgtagagttttaacatgtggaaaactccacatccccaccccccctttctagaggcaggggctgagctcatgcccctatactttactagatagaaattttccaaaaaatatctcgcccccagctcctcgccctggggacagctggcagcctagcgcgggactagcggggggccgacctgcagggtgcggacaccgcgtc

SEQ ID NO: 50876 - DNA, 526 bp, Mus musculus
  source 1..526: mol_type = other DNA
gctggtttcattattaaagaaaagaaaaggtggttcccctctggtcctaaagggaacccttgaacttctaggttcgcgtacagtaacactgaaaccgaaatgtcactttatctgagagagtaaaatccaactctaacaggaaacagcaaattcatcttttttctttttctcagagctcttttgtgagtccccaaagtactatttatagaatcaaaatgggttcatccattgagttttaactttcaaaaatcataaagtaccatcctaaatatctgagatttcttgaatattacccagaactgaagttgtgtcctttgaacttcagcattgtagaactatgaactgtgttaaaaatgatacatgtattcaaatatttccacagaatttaaagtttgattttataattagtttttaaattgcaaaccttacaaaaattttccaaaatttacttagaagcatttcagagctctttaagtataactaactgtgtgcgtacacacaactatttctttttctctttgcaggt

SEQ ID NO: 50877 - DNA, 396 bp, Mus musculus
  source 1..396: mol_type = other DNA
tttttcagattaaatagagaatgcgatctgttcatgatcaatggcatcctaagtgtagaacaccatttgggacaaattccgtactgaattaataacccagaggtgtagctttgggaaggcctgaccagcctagccgaaggctagtccctttgaatcataaagtcaatcgacaaagcatgacttctagattggatataaaacttttacaagcctgtggcgcgccgtgaccttgggctgccccaggcgggctgcaggctcaccaggcccgctctgctcccaggagagcatgggccgaggtcacctgtgaccccaggccaggccaggacggtgccaaggacacggggcgggcagccctctctcctcggaggccgagcgccagagtcaccgccgccgcca

SEQ ID NO: 50878 - DNA, 345 bp, Mus musculus
  source 1..345: mol_type = other DNA
cgacaaagcatgacttctagattggatataaaacttttacaagcctgtggcgcgccgtgaccttgggctgccccaggcgggctgcaggctcaccaggcccgctctgctcccaggagagcatgggccgaggtcacctgtgaccccaggccaggccaggacggtgccaaggacacggggcgggcagccctctctcctcggaggccgagcgccagagtcaccgccgccgccaccggacaggaagcgcctcgaagggagtctgcgaccgggctggggggcgtttgtgcctcgtgagccccgtcgtcgcgggcgtttcgggccgcgcagcctgctgggccaggcccgggg

SEQ ID NO: 50879 - DNA, 301 bp, Mus musculus
  source 1..301: mol_type = other DNA
aaaaagagccatcactcgaaaatgggtcattctgcataaaagaaaatagaaaaaaaaaaaatcctgtttcttttgctaatgttgcggggtcgggtgactcaagctcgcgcggggacgagccgagagcgctcccgacttccctggaccccatcgggagcgcggctccccttagcccaagacgccgcacctgtgggctctgggtcgcctcccgctgcgctcgggcgcagctccccgaggctccgctaggggtctctggcgagccgggtgggcgggatcagctgactctgccggctgcgagccc

SEQ ID NO: 50880 - DNA, 542 bp, Mus musculus
  source 1..542: mol_type = other DNA
tctacctgttttaaaaaaattgaggtcaacatttgaaatgtaaataaataaaataaccaattaaaaaatgcacttattttgctaggcaaggtagtaagaggcagataggcctctaaactctaggccggtacttataaggtgcgcatgcgcacttgtggaggtcagagagcagacagttctctcctccttccatctggattccagaggctgaacagtctggctcggcagcaagagggtggaatcccctaaactccatcgttgtgtctgcactacaccaacccccaaaaaaggggggtacagtaactttcactgacatcttcgggaaaaaggcattacgattgcaccgatgcgactctaggacagttccagaagggcggctgactcgggtgacagacaggtctggcatcttcccgagagacccgggagcgcccggggctgtgcgctcggccagcgcgccgagcctggaccgcgcccgtgcgacgggcgactccgccgcgtcccgcaacgcggcccgggccacgccgctccccgcgcccctcggc

SEQ ID NO: 50881 - DNA, 525 bp, Mus musculus
  source 1..525: mol_type = other DNA
agtattgcttcctaaaagcagtatttctagttactggttttatacttacaggtaatgtcttccattcaatttaatcttttaaaagtgtagtgagttggctatgaactttggaagccaatttacctgcaaagcttcaggttattaagatctaatttatcctcaaatttgcagaataatcgaggaaaacacattattttactggcttttcttagtgaagagaaatattttcttttatttttttttctgcatagaattgagcatttccatttacaaagaaaaaaattgatttagaaaagagtttctgccttgattgatttttctatacaattgtacaagttacttgctaatatttaaattcaaaattttataattgtattttctttctcttatctatttgcttgaaacgcttcaagtgtgtgataaatagacattttaccagctttctggtgagaaaagcttttcagtttgctattccttcgaaaactaaatagaagtggggaggagtccgtcacctccccaccccca

SEQ ID NO: 50882 - DNA, 293 bp, Mus musculus
  source 1..293: mol_type = other DNA
ccttcaagagttaaaggccgcagccggccctgttggggtcaccgcagtgctgcatgcccagagacgcgccaggaagcaccggtggctgcctggctgctcagcctgccctgaccagtgaagttaccaggtcggttagccaaccccgattggttgtgaaataccacacagaaccggagttgctgtggctttaaatgaggccaagagaattttcttgttttcttccctcccccatcagattaggcgcggaccgggaagggtgggactctccctttgaaattgccattgcaggatgg

SEQ ID NO: 50883 - DNA, 435 bp, Mus musculus
  source 1..435: mol_type = other DNA
cgcctggcctgcggcctgcagcagctgcttgcttctccaatgaagaagagaaagcagaaatccctttttttttttttttttttttttttctagggaactaaagctggttccagatagactattctggatctaggtaggagttggagaggtgctctatgaaccaccaccacacacacacacacactctctctctctctcttctcttcctgagaagcgcagaatcaattagccatggtgcccagctttttaagaaaaggcagctgtagctaatagcccactcccagccggggcagagcagccagcgctgtacaaagtgctggtcccagcgctgtttcggcgtgtggcgtgaggccagggcggaggctgccccctcccccttcaggccccgaggcgcagagctcggtttagcaccgactgagctcagggaaaggggcg

SEQ ID NO: 50884 - DNA, 328 bp, Mus musculus
  source 1..328: mol_type = other DNA
tttgaaataaaatgaaattttaaacaatctgtgcttgttgaagtttgaaactaccctgtcttttaaagtacaaacagtatagatagaccttgaactttaagtgtgcaaagctgaccttacctggtttgctcaaattatttcattttatttttaaagatttattttatttatatgagtacactgtagcagatcccattgcagatggttgtgagctaccatgtattcctacacactaggaaggaaatctctccactacaaatatctcggacaggtttggagtgacgccactcaggcaggcgtggccttctttgttagtgaatccccttcc

SEQ ID NO: 50885 - DNA, 361 bp, Mus musculus
  source 1..361: mol_type = other DNA
tttttttaaagactatgattttctgtatcaggaaaccaaacttttgtcttcttcaagtgcagtacaactctttgtagaacaagcagagatctgcctgtaatttcaatgaatgaaagtgttatccatgtataatattgtcaaatacaaaataaaaattaaagtgccacagcttttatcctggccagactggcctactacaaaattaagcaaataaaagtagtcataatcttatagatgggtatttacatttcagttgcttaaaaaacaataaattttgtaaacactatttttgcaagtgcttacaagtttaaaagggaagaaactttccaaatgtcattagaataaagcagtcaccttagta

SEQ ID NO: 50886 - DNA, 331 bp, Mus musculus
  source 1..331: mol_type = other DNA
ttctgtagaccaggctggatggcctcaaactcagagttgtgcctgagtctgcctcattttcagactagctaaactgaattaatagccaaggctgcccacttgatcaactaaagtttgtcccctagcacttacttaggaaagtgttgttaggtaggaataagagattaagaccatacttaatctctcagagttttacttctagcctagttaaaatgcaatcagctattaaatacttcttttctagacgcattgacctgcagaagaggatctgttctttgtctgctggctggagcaagaagagaggagcttcctgcttccgggacttgcgtcc

SEQ ID NO: 50887 - DNA, 311 bp, Mus musculus
  source 1..311: mol_type = other DNA
ttaatatacactcgcggttgcctatgataggtctagataagtctagaactggcctctaggctagtttttctcttattcacaataaaaaccttccccctaactgagcggcagtttcaagtggttacaaaagactcggcacagagtgtgtagttactgtttctcagagacgtgtgtaattacgtcgccatcctgcagaaataacgtatttaattactccacagttaacactgcagtgaacacgtggcgggcctcccacgcacccacacaatgccgcgttccggaagttgcctctccgggagggtggctggttc

SEQ ID NO: 50888 - DNA, 404 bp, Mus musculus
  source 1..404: mol_type = other DNA
ggttacatatttaaaatgtttaatagaaaaaaaaattgcagttgataaatgtaaagaaaatcttaatttctctatttactttctctatgaagttattctatttacatagaaatgtttgtgaaaaagattcgtagagaatatctatatagatatatagatatagataaagtggttaactattcccactttgaacttcccttccataaaatggagattaatattcattcttaaatttgaccaataacaaagataactgcaaaccgcttagctctgctacgcacgtcccagtgaccaacacagaggagctaacctgccccgggtgtccgccaccctaaccaaagtttactcattaacttaggaagcatgcacgctctggcggcagatcagggacgcgaggcggcgcc

SEQ ID NO: 50889 - DNA, 271 bp, Mus musculus
  source 1..271: mol_type = other DNA
actagggtgcgttaagggcggcgcccgtgggctccatgccgcagacaggggcgtcatcccgatcgcggcgcggccgcccgcccgcaggcctgtcgcggtcgccacaggcgccttgagcatctgggcaaagcccggggccttggggacgtgaagcgccatggctcggccgcagtccaccgctcacgcgctcgctccgagacgccgaggaagcaaggggcgccgcgcactgcctgctgggaatgggcctcggcgccgcctcgcgtccctgatc

SEQ ID NO: 50890 - DNA, 205 bp, Mus musculus
  source 1..205: mol_type = other DNA
agccgacatgataaaaatatgtttggtttagtaagaaatgatcaaattgtattctaaagctagcattctctaaaggttatttatgtttaactctttaaccttaacgtcatggttcagttatttttaaatacccaaggcatcatctttgacgaagacattcctgtcttgtgaactaatgaattaaaacatttgacgctctacagct

SEQ ID NO: 50891 - DNA, 167 bp, Mus musculus
  source 1..167: mol_type = other DNA
aaaggttatttatgtttaactctttaaccttaacgtcatggttcagttatttttaaatacccaaggcatcatctttgacgaagacattcctgtcttgtgaactaatgaattaaaacatttgacgctctacagctttttctagaaacatgacaacattgtgcagcctg

SEQ ID NO: 50892 - DNA, 331 bp, Mus musculus
  source 1..331: mol_type = other DNA
agcacactccaggttacctgccttgcggttttcgaggaaggatcattcagaggggcagcagcctccccctctcagaatctgctcctagcttaaacacctggtttttgtgctcctacaggaaagcagcccaggagcttggcaaaccctttttttccctgccttcagcaggtgaggaagacgggcgtggcctggaacggggcgtggctccaggcagggcgtggcctggagctcggcagggcttcagctacggggcggggcccgggggcggaaccgggggcggggctttagcgccccgaggcgctggcctgtccgcgcagagggagtgagtcac

SEQ ID NO: 50893 - DNA, 495 bp, Mus musculus
  source 1..495: mol_type = other DNA
atgtcacttgtcccttactttaatcgacttttaaagtaaacatgagctgcattttaactagggcatgcattttatgcttattttatttataagggtgtgcttatagctgataatttgggaagaacaagaaaaaattaccttcctattttgattaatatcctaggcatatatataataatatgagtctatatcttgtgcgtctgaagattaagaccaatcacaaacaaacagagtatctagtgaccttgagtttatttttctcttcctattgctgtgataatcaccttaggggagaaagcctttaccctggaccacaggtcaagtgtgtagtccgtagaggagcttgctgctggtcacagctcttccacagtaggagaggtgagcctggaccatgccggctcctctgtccccagtaaagatgggtccggatgctagattctgtcaggttgataatagacagcagccttgggatcctggcagcccagcgatcgatcg

SEQ ID NO: 50894 - DNA, 449 bp, Mus musculus
  source 1..449: mol_type = other DNA
gggctcatataattacaagtgcttcttttatgaattaactcaatttagatcacctttccattccccagaaagctcaaacgctgatttcccgggggaagtggccttgtccttctacagagaaatgctctctaaacctacattgttaaaatagcctatttccagtgcttcaatgtgacagtcaaaagaaattaagaaagaaggaagcttttcaagacattatgcctggttcgaataggaagagtcgctataatcttaaaagactgaaggttctcagagttaaaaatggaaactctggtaatttttaaagattactcgctgaggttgtgatttcctatcacgtgctacgcatctctgtgtgtgtgtgtgtgtgcccgcgcgcgcgcccgcgctctcgcatgtgagcacgagtgagtgtgtgtgccgcgagcgcgtgcgcgagtatgcgcgct

SEQ ID NO: 50895 - DNA, 591 bp, Mus musculus
  source 1..591: mol_type = other DNA
cactgtggagctaacattctttgtccagtaatgaaggatacagcttgtaaatggaaaagataccttcttcctctgaagagctgtctaggagaattttgagtgatattgctgctcaaagggcaattttatacttttcaaaaggaaaagtgtagtgtcaactttctatctgatgaaagtttgcatgctgtccttcagcaggggctaacagctaatagaataattgctggtatatttcaacagttataagcatttgaatgccatgctaagggctattcctaagcattcctagtcttagtagatgtcctcaaaacatcactaccaataatcttagtaaacctagagttgatgaacaacatttgtaaaagaggattttcatgagaagaaactgctggccaaagtccagaatggtttctgttttatctcaggaaaatctgacttaagcacatatatttatactttcatatcagactgtcttttaggagaatgtttaattagtaatgcacaatagaggctttgacattaatgagaaatgctaacatggaaggcagtacttctatgtgcttagtgaataaaaacaggtacttcaagtta

SEQ ID NO: 50896 - DNA, 448 bp, Mus musculus
  source 1..448: mol_type = other DNA
tagggaagataattttgattaacatttaatataattttcgatgaagatgttacttaaaatgccagctatttgcagagaccttcccttttcttcagactagaagatggagcaggaagtaggggtagaaaaaaggcctctactttagcaactacagaagacctcatttaagcattaagttagactcttcattataaatcagtattttcaggaaaacaaatgctgtggcaatgggtgaagttttagacaaattaaatcaacacttctccaatcccttggaagaggttttactgcaacctctgaaaagagcagtgcctcttttaactgggagagagattgtgcaaacattcataattatgcctctaggtaaacatactgctgtcttcttagaaaatagagaagtacaaagaatgtttatttgttgccacacctgatttgcaagttccagcca

SEQ ID NO: 50897 - DNA, 412 bp, Mus musculus
  source 1..412: mol_type = other DNA
gacagccatggcattctgtcattataccattgtagagtggaatttgctgaaaatggataggttctcagcctgggcaaagggcacactgtgcataatcatcgtcaattaagaaactacaatattgacaaactctttaagaaggcgatttcatgaaagctttggttccaaatcaaacacatcagctgaaaggttgtcatcagcttctgggatgtgtgtaacacatatttgggggaaaatggtccatttaatgcaagggcctcttctttttcaagtacgtatgatctaatcttgcagtgtttttcagagcccaagagtagaaaaatataggcccttgctttattgaataatgattggcataggagagtctatagtcgggtactttgaagactcaaaacaaacttatttttgtatg

SEQ ID NO: 50898 - DNA, 552 bp, Mus musculus
  source 1..552: mol_type = other DNA
ttcttctctgtttagcagaataaactactatacattgtggctctaaaaaacacatggaaaagataatttatttacaaatatttcgtgtttgagaaaatactctttgtagaattatagaaaaattggctggaaatatactacacaaattatttacaacattattctgagactcacagaggtaggcaccaaaagagacctggctttctgtgtacataacatctatcaaaagatgtatgctaacatcttcagtttcattctaataaaagatagaatggtgaaagcaagtattttcaggtcaccattccttacttggaaagatacacttgaaagcaattcaggttaactctacaaagaagtattatgtgtttaatttttttcaatatttatcactttttccaatgtgttacatatttgggtatatatatagttttattttattcttatgtggctttacataaataatgggtttttgacagtaactttaagaaactgttaagactgttaaaggaaaattacttctggttttgaaatgataatcatttggaagatgat

SEQ ID NO: 50899 - DNA, 582 bp, Mus musculus
  source 1..582: mol_type = other DNA
agtttttaaatatttgcatatactctaatgtaagaatttataccaaccaaggcatggaatcccttgttcatcataaaaggatttgttctttttactcagaatgacgcctttcagtggtaatatgaatgacattgtaatatcgttttaactgaacgacatagtgactgtttattcatctatagaatttaatgaagcaagcactcattttctgaataaacatattttcatgggaaaccattttctattcaggcaggagtctttcccaggatggcctttaaaattcttttgatcataaaagttgtaagatttttttatcctcttgattttatatatatatatacccattttacgaagagaatagaattacttctcagctagttatgtgtagtttgctactattcaaagtagtttgcttcaaatttcaaagacaattccaaggaagaattctaagaaaaatatttgtgctctggtgactagaactgtactgagtccactttaccaggggccctatgaaaacccagacgatgcagcctcagacaacaaggaagatgagtctgcagacagagcagccactctctgaga

SEQ ID NO: 50900 - DNA, 427 bp, Mus musculus
  source 1..427: mol_type = other DNA
ttcattaataaaaatagtgcactatttcacaccaactacatctcagttctagggatctgatattttcttcttgcctctgagagcatatgcgcaagcacacacacacacacacatccactaatggttttagtaaataatgagaagaaatgctattgtacatcctatttatacatggatcaactggaggacagtccgatccatttaagtagaaattaacaacatcttatctcattctgactgaaacctccagtgattgacgttaattagtattcaggtgacacatggggactcgtatttgccaaacctcacccttatgattcagttatggcaacaacataaaagctattttgaagattaacaattggacttgcatcttgttaataagacaccatttcatatggagcttaagcaaattactatataatgt

SEQ ID NO: 50901 - DNA, 423 bp, Mus musculus
  source 1..423: mol_type = other DNA
ttcagttacatgcttagtcagactttgcctctctgaagttaggatttaaaaacctaaaactgaattttaagtatacataaatgatctcattcaagaatattttcttctatcaaaacaataaaataaaataaatttattcgagattaagattgtaaactacaaaccacaaatctgacatttttctttaaagttacactctaagggtaatacaaatcattaacagaaactccccagatgatattcttaataattagttcaactctcattttaaaaaattaagtatagtatttgaacatttccttacagtgtgcttgtgacaaaacaaaagggacaaatgattttgcaatagtaaccactgagtacttaatctcttactattaaactgcaattaatatatgaatgtgtgaaagaattatacttaat

SEQ ID NO: 50902 - DNA, 564 bp, Mus musculus
  source 1..564: mol_type = other DNA
ccaagtttaacattttgctatgattttcattctaaattattaacattcatactcagatacattctcatttatgatatgttgttctgataatggtgactcacaaaaatattgaaaccattcatcacattgaaatgatggttagtgaaaaatatatccacaataccattccttctggtgccattgatttttgtacactaaatgtcccttaatggccccatattgttttgatttcattattctaaataatcatttttatacatatgtgttcaagactagaatgatttttgctcttatagattggacataataaccattgataataatgtattaaaaattggaacattatactgcagagtgtgaatcaatgcaagattttgccttttattcaatgaccaattgaggataaagactttgtcatctctgagagtagtcatagcattaaatacatttcattgactcagacatatatcccttaaacgaaagattaaaggagttagttaactgcaattatatagaaaattactgaggtcatatggaaacaatggttgtatgagtatataaagt

SEQ ID NO: 50903 - DNA, 403 bp, Mus musculus
  source 1..403: mol_type = other DNA
gataataagaaaaattttagcattgttaatttataaagattgattattcaggcattgaaaatgttttaaaaaactcaaatggaactgtttccattgagatccttttcaatgacttatttctatttgatgtgataaacaatgtataagtgtagcccatgctataattgtattcagtgaccactatgtggaattgcaataaggggatttggcaaccattcttatgaatagttctatccatatagaaacagatctagcaaccagatatatctccttcttgtacaatcaagcacaggcaagtagtatattctacaggagtggaaataaaatagtcatagattgctgagttacacatttgtaaaccaggaagcacacaaatgcatcaagtatgagactgttgggtacc

SEQ ID NO: 50904 - DNA, 424 bp, Mus musculus
  source 1..424: mol_type = other DNA
gtcattccttaagggactcagggctgtcccttgagaacagaccttgacagtcattcagaattgtgcctaaatttcagagcacctgtctgtcactcagtgaggaaaataagaatgattgtcaatggttaatctttagtaggttccacaggatattaaaaaaaaaatctgtcagatcattaaaaaacagagatgcatatttttatcattcagtaccatgggagtaaaaatatttttctttataagatcctctggttaaactactagtgtaaaatagtcatgacatctctgacatagcagtatgtcattgtcttaactataacaaaattaactattcaaatgtaactacaattacagagattactgagttgcacatttgtaaaccaggaagcacacaaatgcatcaagtatgagactgttgggtacc

SEQ ID NO: 50905 - DNA, 398 bp, Mus musculus
  source 1..398: mol_type = other DNA
tttcaaagctgtataagattagatccagagtgcctctgtgtatttattatagtttatcatcagtctcctagaaattatttactttacctaaacttagtcactccctgggataaaactgacttgtccagatacctaggatatgaaatggtctccttttatcatttctttgactccattctctgctcttccctagctagtgcaggtaaagaacattctttgcttgcaattcattaactaaaagaagagcaatttccaatttttcctggacacagtgtaggtatcagtgtaaaacagtcatggcatccgtgactggctcattgtcatagctataagaaagttgcaacacccataaatacattattcagaaaactattcatttcttttgagagtatataaac

SEQ ID NO: 50906 - DNA, 423 bp, Mus musculus
  source 1..423: mol_type = other DNA
aaagtgatatatgctgctttcggccagaggaagcacctccgttataattttttcttttagaataaggacccttaccgggtaattagagatagacatatctttgacattattttaccatcttagataaataatctttagcattcaaactagcacaaagcataaagcgtttagcaagatggatatttaatatctagattccattcttaggcaggtgcatgagaaataagtttcattaaaatcgttttactgaagtccagtttattagtgttttgatgacactattcatcacacaccaatcagtgtgtgtttttgtttaaaagaaatgactagccagatggcaacaatttttatttttaattaagctagcttccctcagcccagacagtctacctctaaagcagttctctcaattcaattaaagcc

SEQ ID NO: 50907 - DNA, 475 bp, Mus musculus
  source 1..475: mol_type = other DNA
ttactataactaaataacttctttagaaaagatcataggaaatattatctcaaaattacaatccatgctggacactgagcatcccttcactttggtaggaaaaacaatggcaactgaagaaatataaaataattgagtgtgaatatggcaatcatacttactcaaaatattatacttctatgtgactctttggaaacactgatacatttcaatcttgatctgggcaattttccaaaattttgtggattcaaactatagcaatgcctccaacaaaatgatctttgaagaattttaatttacattcaagaatatttagtgtgtttggtattgtctaataaaaagaaattctgttatggtctattatctttgtacttgaaagatacaatgactccttctaataaattctcataaggttaaagcattaagttctgagacaaaaaatcttaaacatccttaacagatgttggccaaaata

SEQ ID NO: 50908 - DNA, 646 bp, Mus musculus
  source 1..646: mol_type = other DNA
cattctttaataatgtttaaaccatgtgcaataaaaattaaataaaacagtatggctatacgataacttttcctttgctggaaaatgtatcctatgaagacaaagatattttgtttcgataatgaagcttattaagtttgttaataacttcagattctaattaaaatataaaacattgttataaagggattctgtgatgtaaatattttacagtctaatgttctataatatatagtttgtaacataattcacaaattgtgttataaacattgaacgtgaatcttttttctcccaagagggagacatgtaaaaaggggatttatttctttctattttcaaaagcttctaaacttggaacatcaaatttttctttccagaatacaaacttttgtagagtgttgaaccaggcaggattattgctgcatcatccatttcatcacattttgaagcctgggataaataaagcatctatcttaaagattcaattatggtggcttaaattgcatttttactccatgaataattgctttgaaaactaatgaaattccttcatttagaagtgcacattcataaaaagtcctttgaaggttaaagtatttcattttttactggagcccaattaagcagtctcattaaaatggacaca

SEQ ID NO: 50909 - DNA, 448 bp, Mus musculus
  source 1..448: mol_type = other DNA
ttgtgtctcctcctcccttcactttagtggaagaaatcagactactcatctgtaggagacctgatgcctgactccctaaaggtgaaaaaaatgaagtgaattttctatcactgtccaaacataaatataaaataattgagtgtgaattcatacttcttacaaaatatgtgactctttggaaacactgatacatttcaatattgatctggacaattttccaaaattttgtggattcaaactaacaaaatgatctttgaagaattttaatttacattcaagaatacttagtgtgtttggtattgtctaataataagtaattctattatggtttattatctttgtacttgaaagatacaatgactccttctaataaggttaaagcatcaaataattttaaacatccttcacagatgttggccaaatctcagataattgctattcatagaat

SEQ ID NO: 50910 - DNA, 535 bp, Mus musculus
  source 1..535: mol_type = other DNA
aaagtactaaatatccagttggtactatacaacacagtgaataagtacaatttataaataaaatgaatgtagcatgttgataatcttctgattcctagactaaattttaatattatgataagcaaaaaagtgtttcatatgatgacaagcacacacatatatatgtatatacatacatacacacatatatacatacacacacacatatatatatagctcactcatgtaaacatgccatcttcatttgaaagaacacatttggagattacaaaacatttaaatatttcaaataacttcacttattagaatttagatggatattagatgctacaaattagccaaatgatatgaatgagaaaatatttagataaaagaagctgtctcatatgagcaatatgataagcccaaatatgaattctactataggaatttaaattatccaactttgaagtctttgttattttcccataaaaaaggacacaataaaatttttaatgagttatatgcctatccttgttagcaaacagatataagc

SEQ ID NO: 50911 - DNA, 420 bp, Mus musculus
  source 1..420: mol_type = other DNA
tacctgtatgttcctggtaggcactgggatgataagtttgcttagaggaaaaaaaaatatcacactctcaattctgtacttgttttgcattttacaatttcaaaggttactgtacttaaaatgcaaacactgacacatttttctttctgtgattccagatctatgaattagactattgtcatatagcacaaatctagacatttttaaaaaaccaatcttctggataaataggtttgctctgtatggcgtgctgaacaaatagccatgggtatagcaggagaaatgcatagttatatatcaaaatatccccaccacatgtagatgatgtaatactcttggtaataaagcacttgattcagtatatatttgaaggtatattattctaaattgaacattaagcaatctcaagtattttaatga

SEQ ID NO: 50912 - DNA, 611 bp, Mus musculus
  source 1..611: mol_type = other DNA
tgttgatgttcatttttctgaaatgtcccaaatataaagttaattaagaagtaaaagagtcacattaaatatcaggtacgtagtttggctgattttggcaaaagacatgagtttaaaagccagttttgaaacaatctttgtgtctatagagctatatcacaataaaagtcctctaataaccaagtgtaagctttaaatataattttgtatctagagtgtcccactcttcaaacgcagtaggactgatgccttatgacgttcattgatccccccaagcagatcattaatttacattagagtctccaaattgaacacagtcctttgatttaatttgtaagttaagcatctaagaaaaaacagacatgagtagatgtaattttgaacaagacattgttagatgtgatcattctaacatgccaggtatgaggagaactcttaggcggttggatctatccagactttgaagatgcagcaactccatctcattaagtatttggcagctaagtgcattcaatagtttaatgaatgtaaaggaggccctcctaagtactagttttgagtaactttaattaaagtcaaatgatgccacgtgttcttctaggagtagcctc

SEQ ID NO: 50913 - DNA, 671 bp, Mus musculus
  source 1..671: mol_type = other DNA
atgtgatatatcacacatacacacatagaattatttgtttaacatttccgtatcaggaaaaaaaatgttttcctgataagattcttcacagaaataataagattcaaactttctgatacttatgagagtaaaatctttcatattatataaggttacttataataataacatccttcctagtatctaaagttttaaggagtatatcacataccctctgtgtggatatatataaatgtatatatttgtgtgtatatatatatatatatatatatatatatatatatatatgtgtgtgtgtgtgtgtgtgtgtgtgtgatatgtgttatatgatcatatatcatagacacatgatcatacatgtatgatatatgtataatatgtatgatatatatatactatatatgattatatgtattacatatatgtatacatatgcatatcacagatagttcatatagatgtatacatcaaatctatatattagtcataaaagaaatacaaatctgaaatgttaacacataagagagcttgcatgaattcattttaattactgtaaacagtaactattcacatgttcaaaagtatgttgttatgcatcttcagaattattactagtaaagtaatttacaaagagtttgcaattcctttgatgtggtttgccaagcctgccc

SEQ ID NO: 50914 - DNA, 454 bp, Mus musculus
  source 1..454: mol_type = other DNA
tgtaggaaaatacgtaataaaaaaatatttttttaaaaaagagtgtattctaaggagagtcccttgagatgtttctgaataagattcttgtcagaagtgtctaaagtacaaagaagacatgaagccacatgtgaaagttgttgtctcgtgtgatgaaaagacacaaagaatgaattccagtgagtcattcttttaggttggctatttagcaatcactaaagacttactaccaacccgattagaagattttaattagaaaatcgtttttcatcttggaagcattttctttactggaatgcaaactcattaaaaaaataatgattactaacaattccttaatagaagtttggaccttttgttaagtaacaaagaaactatttaaatgaatttatagacttaaaattattctgtgcacggagatgagataacctgtccctgtttagtgcgctcaaca

SEQ ID NO: 50915 - DNA, 303 bp, Mus musculus
  source 1..303: mol_type = other DNA
ttaacatatttaatatatttcaaggaagctacactcatgaaatatcaaaaacatggttgtcctgtgagatcgaccaacctgaaataggtccagaaggatgtatgtatatctaacatgcatatacaataaaatttaaagaaggatagatctgaacaaagcaacactttgatgggaagtgaagattttggtgtcatataaaatggaaaactttaactcttgggaggcacgacacaagtattttatgtttacaactagaagtttcatgatctcagcttttagaaatcctgacactgacaatttcat

SEQ ID NO: 50916 - DNA, 478 bp, Mus musculus
  source 1..478: mol_type = other DNA
ttattgccaaataacaacttgaattagtccctagtactcagatagaagaaaagaactgagttctacaatttgtctggcacacacatgtgccccgtgtctcatgacattctaatcctaacagtatgttcagcattctgtttactaaacagtgtacacataaacacaagtataaacttttgagttactaaaactattgaagttttcactatgttcatttatttatttgaatttttatcacagttgatggaatcagtaacacatttcttcatcaatctgcaataattcacaatttaccttggacaaagaagtgttaaaggtatatctgtgttatcaaaaatgctccagtgtctattccagtgtctttttaaattgtaacttaacacccagtgttacctgtaaccgcttacatttgtaatagatgcttctctaacattttaagtgttttcttaacagcacataaatatattagtcataaaat

SEQ ID NO: 50917 - DNA, 772 bp, Mus musculus
  source 1..772: mol_type = other DNA
atgactaaaagcagatttcatgttcaacattatttattattgcaaaggaatttaatttgaaaaattattgctgaaatcaaatgtctaaaaatgctctagatgatattaacttattataaatactaaaatagtgacaatttttctagcagttgatactggttttttttttttttttctcaaaaaaaatcatagaaacaatagcatttcaggtctcagaaattttctaaacataactggtaaaatcttttaaacatttcaaaagctgaaatatggtattttaaaaatcagaatttatgaagccttaatttatcaaaatatatcataatcatttttactatttaaaatccataaaagaattgattttcatgagcatgaaaagaaattagtcaaaaattaaaaatctatgtaattaatattccagatacaaaatttagtttttttgttcactgaaattttaaatattaaagtaaaatttaaaataaattgctattagcctgtttcttaattgcattttaaagacaaagtccaaagcaagtttctcccttatttttgatacacagctataatattatagagcaaaaatgttttgaatatgcaacagacaaaatacacaaggaaaataatatgcattttattctacacatgcgcagcttgggtatgttatgcatgtatacagcaataactttgaggttttgtcatatggttgagaaaaaaaaaaaacactaattatattaaataagtcttaaaattagccaatggcatgagtggtggg

SEQ ID NO: 50918 - DNA, 673 bp, Mus musculus
  source 1..673: mol_type = other DNA
aaaaataagcttttgtgtgaatttattaggaggattcattatcacacaaactcatcatatgctgtcaaaaacagaataattctggcactactagttaaagaaagagtagttgacttaagtaatttgatcaatgtaaatacatgatggtaaactcattgtatagtgctgtacataaaatataattctagtattcattaaagtattgaataatcaccgtgcacttatttgtaaaaataaatggagaaataagatcttatgcaataaataaaaatgatttgctttatagaaattaaattcaaatgggattagtctcatctgtataacaataaaacttaatgcatttagctcatagttcattttctaaaatactaattagttggaatattattaccatcaagggtatgaaaaatatgtttgatttcagaaaaggaaaatgaatttgcattgcaagtgaagaaaaattcatgattcaaagaaggtatggcttttttgtaatcgagatacaaaaaaaaaaatttgaataagaaaatgtcacctctgcatatagtatagtcttaggcattgtttgggtcacaattctcaagctattagtacatgtgatagtattttcatgatggaaacaacaaaataattagactagtcataaaattagtcaatagcatgttacacccac

SEQ ID NO: 50919 - DNA, 506 bp, Mus musculus
  source 1..506: mol_type = other DNA
atgtgtgtgtgaatgaaagaacttacataaaaaaataaatacacacaaaagaataagttttgaacttgaaaatttaagtaattggaggtaattttatttcattcaatttattaaaaaataaatagtgaataaagtactaaagaccaaagtgtggacactttgccccttcttagaatttgaaaagatggagcatctagaaactgcttcccataatcagactagcaagattttgctaaaaggacccagatatggctgtctcttttgacagggcccactaaccaatacccccccgggggggggctcatgtctctagctatgaatcagaagatagcctatttggccatcagtggaaagagaggcccattgtagcattggaaatgtaattgaaacaaacacccaaatttttaaaaaatgtttataaaaaaaaaagatattatcacgatttaaaacaacaaaacaattaaattagtcataaaattggttacaccctcagtgagacagtataa

SEQ ID NO: 50920 - DNA, 324 bp, Mus musculus
  source 1..324: mol_type = other DNA
cccttgtgtttcaaaaaaaaaatgagttattgataaaaatacaaaaatatcaagcttcttatgcttattttccagagattaaactattgccttgggacttcatgaatgctaatgcttaagcttttctgaaatcattgtataaaacaaaagtaaagccaattttgattgtctgaaacaggtcacagtttgtatatttaaaatcagccatttcctgcaaaacaataatctacagatttgatctgaatagtatttagatgatgatacactaatgctttaatgccagatttaaaataaactcaactaattattcaaattactttggaa

SEQ ID NO: 50921 - DNA, 553 bp, Mus musculus
  source 1..553: mol_type = other DNA
gtggatctactgcatgatccaggtttaccaagattggcaatatatacaaaggtctctatatcttatgtctcaaggtctatctatagataaacatgtaataaaactatgctagatttatggaatgaaacattattcctctgttaggataaatgaaattatgaaaattgaagcaaaatgccacatattttgtggatgttagacttgaatcttcaaatatacattcttacaatatctcatgtaatgttatagtatttttgtagctttttctttaaattttatatatgattatatataaagcttgtatgaccatgattttaaaagaagtatgttctgctgattttaaagcaatttataatcaaaaaaggcttacaaaagagagaaaaatatcaatcttcttccttctctaggtcaatggaaattaatatatgcatatctatgtataatggagaaaatcatgtgacagaatcatgtcatgtattaggaataatcagattccctgatttgactgtggaatcagtggtgctgcaacgcctgtggtttccacaacaataac

SEQ ID NO: 50922 - DNA, 585 bp, Mus musculus
  source 1..585: mol_type = other DNA
gctatgtccttatatacttagcctcttagaacatatcctttgatccaaatatttcattcactcttggataattatattttagagaaaagtaattatatttatttatatactgcattagcaggagtatacacatacagattgactcatgtttaagaatttgacttaaatgaaacacaacaataaaaaaaattgagccaagacatttttaatccttagtaaatgatattttagaactgactagtgagcactctacacttcagaaagaattgagttctagctgtagatggagtcttaaaactcaagtctttgtaaaaaaaatctataaaaagtaatttgggctgattttagtggtaataatggtgattatttccaaggacctcgaaaaacatagtaacaaacacattcttattggtcatacatatttgatgatgtgttatgtaatagagggtaagttatagtttcttaagcttcacctttcagaatatatattattattattattttctttaatgccctttaaagttcctagagtagtagtaagtaaattgtgaattcctaactaaatatttggagaatgaatccacc

SEQ ID NO: 50923 - DNA, 355 bp, Mus musculus
  source 1..355: mol_type = other DNA
tatatattactggggctgatggccaactaggccagtgccagttatgtttttaaaggtgtctcaacaacaagacatgttttggcaaggatgtgtaagggtcacatacagatagcatgctcactgcatctatatgtggagagagagagagagagagaatttttcttacattttctccaaactttgctagatacgtcacacattgatacatttaaacagtatttgcttaggaacatggtttctctctatgaaatgagagtatacaaagtaatgtactcattttaagcaaaccattatgggttgtcaacagtgactggaatgtaatgtatgctctgacaattactggcagtatataaag

SEQ ID NO: 50924 - DNA, 441 bp, Mus musculus
  source 1..441: mol_type = other DNA
atttacaagtaaagattctatgttctccataaaaagtaaatatgtgttaacaagaaaattactggtagttttctttatgaaaagatttgttcatttttaatgaaaaattaatacatgtatatactatgtgtacacgctgattcatgttgtttgaataagaatagttcagataactttttttatgcaatgctcttaaggaaaaaaaaacattgagatgaatttatacaaaacaagctgtttaaaacagtaatataggaaatcttagaatgatttttacccaagagttttagagcctcagacaatgtcaaggatggtcaccggctttgaagatagcacacattcctttgtaaacagaaaagctaacaaaaatgtgggcagagtctgtttctttatggacattttattggaaaataataggcttaattatgcaaatcacatcca

SEQ ID NO: 50925 - DNA, 600 bp, Mus musculus
  source 1..600: mol_type = other DNA
ttttaaaaagtctgtgagtttatattatcatttgacacttcataaaaatcatcatattttttcagataaaatgctcttacttgattcaatagaaaagtcatcttcattttaggataaaattttccattagttgctactttaaatatttacctgaaatagtgtattggatcaacaaatcacaccagtgtgacatttagaattatgattaatcaacaaattatacttttattttacagatttttaattgcagtatagacatgtactactagatatgatggtgtctatccaattaacttttacacacagttaagtagagatactgatttggagacaaactcatagcttattatttgacttaaagtgtcctacacatatctactgaattctaaacctggttgtataaattcagagcaggagatgactgcattaaagctaacagttacaaagcctgataactgaaattatatatagggtctgtaagaccaagcgcttttgaagtccctgtaataacccccttgcattatatcacaaagagctttttcatagactcttaaagaatgaaaatgagggccttgtgttttcttaagccacaccccccag

SEQ ID NO: 50926 - DNA, 534 bp, Mus musculus
  source 1..534: mol_type = other DNA
tgataaagacaatgaccttggagagtctttagtttattcctgattaaaatgcatcctatctataatagcttgtgtgaaaataaatatgtttcaactgtattgagcaaaatgagaaagacactgtagccttttaaattaacattataataattttaaaattaatgaagcctcatcctaatgaggctcacaagtaattgttagccatttttattagagtaaaacttttaggaataattctccaccaattttattttaaaaacgagcatctcacttgactagagagggatgcccagagctttctttccttcctacactcttcctgctttggtacatgaaggaaagctcatgaagcgatttgaaagggcagctccccttatgagaagcccagcgtattaaatgccattgacagagctgagcatgccatcagcagctgtcaactgcattcttaacccagactaaagtacagtgcaggagacttatgatttagttaccaaactactaaatgtcctttacgagaaggcttctccagggaca

SEQ ID NO: 50927 - DNA, 194 bp, Mus musculus
  source 1..194: mol_type = other DNA
aacagaataatgaaataaattatttttcctccttgcttcgacctcaaattccaaatgaaaggcaggggaatgtagtcacctctccctttgtctttccagttagaaaatgtattagaataattttttttctggctttaatcagctgatcccactggctgcagggcagagccacccgcatctggggaggcgtgctg

SEQ ID NO: 50928 - DNA, 234 bp, Mus musculus
  source 1..234: mol_type = other DNA
ctgcagccataaaagctctctgctttgtgctgcagaggccattagaagttttatttaatgaaactaatgtttggctgcaatttttagaaactgtcctataaatgttgttcatgggaatcaaacatatggttaggagataccaagatatctttttgtaaggaggtggaggaggaggagccgccgccgccgccgccgccctgggccctcacccactccctcgccggcagcggggaa

SEQ ID NO: 50929 - DNA, 249 bp, Mus musculus
  source 1..249: mol_type = other DNA
agaatattgagtcatctatatcccagtaaggtgagagtctgacactacccacactgtgttcattgagcaaggcaccatgcatggcagagccatgcttcccggaccccttgaagaggagttattttattttgtaataataatagacttagtggaagtaatagacttgtaaaagtaaagttgatttttggtgagcaagagaaacccttactgaaatacaataaatatttcacagacagatggttttcaata

SEQ ID NO: 50930 - DNA, 410 bp, Mus musculus
  source 1..410: mol_type = other DNA
ggcatgtgcgaacctcgtcagtcaaactcaagttcacttgcatacttggctaaggccacatgccgcccaaactagaccacgtgtcgcaggtacttccaaggccttaggtggcaggaaaatcctttcgcgcgcgcgccaactcgcgaggcggaggccagcaggccctcccgaagctgcttttagccccaggctgcttacgccagagcaccgtgtcaaggcacccgggagtgtgcaccgccggcatccctccagccacagggcccacctggcgcccggatgccgctcaggtacccggcgtgcgcctgttgtgtcctccgcctcggattggctggacggaggcggagcccaatcggagctcggtttcccacgggcttccgaggccccgcccccgaggcccgctggcccaggag

SEQ ID NO: 50931 - DNA, 360 bp, Mus musculus
  source 1..360: mol_type = other DNA
tccaatagatgactgtgaacttctgtatttgccaggcactggcaaagccttacacgagacagctatatcagggtcctcagcaatttaaggaggaatgaagtatccacacgttggtcttccttcggctttacacattttagacatcatgagcgcgctgtgcaaagtcagtgacaatccgcatttcaggcgcgcacgcgggcctcgtgttctcggtttccgcggcgactcggccgacgtcctcgggaactttctcagtccgcacgctccaggagccggagctaccctccgccccgcccccagcgtgccccgcggccagggagctccacgaagggcgggcggaggccgcggaagctccgtggc

SEQ ID NO: 50932 - DNA, 437 bp, Mus musculus
  source 1..437: mol_type = other DNA
caagaagctcatcatctccagggcccgaagccatgctctttgcaggatgtcaacctgcatgatgcccctaggatcttctcggtagggccagttgctttccctaagaccagccacaaaagtgaggtttctacagaaaaactttcatttttcagcggtcgcagcgcgcggcaggcggtgagaaacttggagactgcagacgctcaccctccgcgctttgtttgtcgcagcagcagggcgcagtcctgcccggacacaatgcaccccgggagccgtcgtccggatcctgagcccagaaggcgggaaagcgcgcgacaacgcgcggtcacacgctagcggctcggcgccggtggggcgcggaggggcggggcgtgggcggagccaagcacgagcggggcggagccgggctcaggaagcgcttggaggcccgagctgtccca

SEQ ID NO: 50933 - DNA, 641 bp, Mus musculus
  source 1..641: mol_type = other DNA
tacgctgccgccactactgttagctgtggcggctgcttctcccgagccccgacacatagcctgctaggtacccctgcgcgatccgcaccccgggaggcagcaggtcttgggcagcccaggagcgcgcgtctacgcggccgcgcggggtccccctgtctggcgctcaggtggcttcgccgctcccctctccagcgagggtcgagttcggctgtggagctcgcttctgtccccgccgcccgcgagcggattaaatttctgcaaattcaaactgtgctgccttccagagggcgcctgcagcccgccgcgcgctcctctccggcgggagcggccccggggagcaccgctgaggacccggcgggccagagggcggcggcgcccgggcttgggggactccgccaccggactgtgcccctctcggaccagcagccgctgttccctctcacagccgatcggggcaccagacgggaccgcgggcgcgatctgggcgatcgatcctcggaggacgaacttctcgggggcgggtccccggtcgcccggtcgccagctattgtctgcgcgcggcgctagcacagaggcgcggggggcgtgagcacagagacccgggccgggcggggccgggtccagggcggcggcaggaggag

SEQ ID NO: 50934 - DNA, 294 bp, Mus musculus
  source 1..294: mol_type = other DNA
gaaggcaaaatagcctttctagtttctttgaaatcaaaagctggagtagggtgaaccacagacccctgtttttttctagatgtaggaaagcgggtctccgggatgcttacccagcacgggcatgcccgctaacagtgtggaggaactaggtgagctgctactcatttaattcgaagccttcaactttctcagcagcggcggaaggagctgaaatgcccgcaggacgcaagcgcagtgagcgcggctcgcgcgccggtcagatggcgagcatgccgggcctgcgcatgcgcagag

SEQ ID NO: 50935 - DNA, 321 bp, Mus musculus
  source 1..321: mol_type = other DNA
caaggattacttcacatccttttctgaaaaccagtggggttaagaaggaagcaccttcctaaaacgtcaggatgacgctcaagccacccggtttgctgggacagaccccagccccggatgcagttggtgtcctcctggctggccacccaggtgagcgagtcgcccagtggccggcgacagcgggcacaaaggaacaccagcgggttctccgccgcggccgcccacttctgcagccgcaggtagcggctcgagtcttccgacagacgcttctcccctctgcgcatgcgcaggcccggcatgctcgccatctgaccggcgcgc

SEQ ID NO: 50936 - DNA, 318 bp, Mus musculus
  source 1..318: mol_type = other DNA
gggaggggcttgtgggaccctccgcgtccagccagtacgtaagtgagctcataggcaggcggatttctgagttcgaggccagcctggtctacagagtgagtcccaggactcaccaggagatagtgcctaactccaaaggcactatctatcggtgcagcacataggtagctaagagctgggtcgacccttgtgctcagttgaccagatataccgcgggttcctggacttcggaatccaagccagagggagaactgcctcagagtaagtcaaggacgctggcaggcttcccttgcgacggtcatgtccagcactgctagg

SEQ ID NO: 50937 - DNA, 326 bp, Mus musculus
  source 1..326: mol_type = other DNA
aagtgagctcataggcaggcggatttctgagttcgaggccagcctggtctacagagtgagtcccaggactcaccaggagatagtgcctaactccaaaggcactatctatcggtgcagcacataggtagctaagagctgggtcgacccttgtgctcagttgaccagatataccgcgggttcctggacttcggaatccaagccagagggagaactgcctcagagtaagtcaaggacgctggcaggcttcccttgcgacggtcatgtccagcactgctagggtctctacaggggaacggccccctgaccttccagccatgcagctctga

SEQ ID NO: 50938 - DNA, 260 bp, Mus musculus
  source 1..260: mol_type = other DNA
ttggaattttaaatacataccaagatattgataagatctgttttttttaattagagttacttgaaatgacatctaaccagcctaggccttcttgagtccacctgatgtcaagccctcgggaattcacccggcttacaatgaagttgttcaaaggatatcattaaaatgctcagagatttttaaatatctgagctctttgggagcaggggaagcattttgatccatctgccccagattgttgcttgcaggcagagcacagc

SEQ ID NO: 50939 - DNA, 462 bp, Mus musculus
  source 1..462: mol_type = other DNA
gcttccaagttctatcatagaagcaagagcatgcctttgttctttatttattacttatttataaatgagtaagcaagtggcttactgaagagtttactgacagcaggcagctggagcaggaagctgaatggatggaatttaattttctttccagggctggcctgacgagagtagggagtctcctttggctcacttgggaatcatacatgtgtcacagaagcagatgtccactattgtgaaggggtagaagttgagcaacagctcccccaagttgtcctcttggacacatgtatccatgacacatgtatgtgtgcgcacagacacacacacacacacacacacacgtaaatttaatttttctgaaagttaatgtttaaaaaagatttatttatggttaaaacaaatttagtgtactgtgtgggtgcagttgctcacagaacccagtgagtactgggagccaac

SEQ ID NO: 50940 - DNA, 528 bp, Mus musculus
  source 1..528: mol_type = other DNA
gccccccgaaggatgtgtggctgatcctctgagacagtgccacagggaggcagagtgcctggcctccgcactctgagctctgctcccagagcagggcggggctggaagcctagacccgccaggcgcgctgggtgaacttggcaagccctcccggcggtggatggggaacactttgtgccgagcgcccgcccgcccgccgggccctcctccttcccaccggcgccgcggggcctggacgcctgcgctgggtctctcgagtgcctagcacctggccccgcagctctgggtgtccaaatgcgtagacaccgcacgtagtcaacagggtctccgagcaaaaggaacctggctcggagcctcgtgactggtttgaagctccctcaggtcccattcagtgcgatcagacgtactgcgtgcttgggtggcagagacggtaatgtctctatctccggcgtcacggacgggcaccagccgcgctgctccaccggcctgggtgaggttggcgccgagccagcgcaagctgagccagca

SEQ ID NO: 50941 - DNA, 534 bp, Mus musculus
  source 1..534: mol_type = other DNA
gcccgcccgccgggccctcctccttcccaccggcgccgcggggcctggacgcctgcgctgggtctctcgagtgcctagcacctggccccgcagctctgggtgtccaaatgcgtagacaccgcacgtagtcaacagggtctccgagcaaaaggaacctggctcggagcctcgtgactggtttgaagctccctcaggtcccattcagtgcgatcagacgtactgcgtgcttgggtggcagagacggtaatgtctctatctccggcgtcacggacgggcaccagccgcgctgctccaccggcctgggtgaggttggcgccgagccagcgcaagctgagccagcatcaagctgcgcagcatcgggtcgctgctggagacgctctccgctttgggctcggcgcccccgatcggcctcggccaagctccggagcaaaactccctaggctggctccctaggttcatggagccaggaagatttcttctgggatcctcgccccgccccgggtctccgccccctccccttggctggggatcccg

SEQ ID NO: 50942 - DNA, 249 bp, Mus musculus
  source 1..249: mol_type = other DNA
ttatagatttcagagcctatagaatttccattggcaagtaaaaaatttaaaactatgagtttgagatcatttcaaagcacaggttaagagctctgcacagcagcagcgcttccggaagcgatccgtgcctgcgcgaaaccagtctgagtttggcggcggctatgctggacctgcccgggcaacagctacttccgggagcggcgactgtgcggcccgcacaacctgttcttccgggctgaagcgtgagcc

SEQ ID NO: 50943 - DNA, 609 bp, Mus musculus
  source 1..609: mol_type = other DNA
atggaacatgattgccgtgctccttggagggactacttttgtctctgaagtataggcagaataattctgctggacacaagttttagacataatgtctcgtttaaaaagatagtttgaaacagtgtgacaaatcgacagtgacagccacgagcgccacccagccggcgcggggtgcacaccgtcccccgcctcgcactcgcccatcgcccatcaggtctgcggaggcggcagggggtggtcctgatgcccgactcgagcacgaatcaacacgcagtccctccctgtcgcccgcggggagggcagagctacagggctccacgcgaggaggacggaccctccctctgccggctcccctggccgtgccaccttcccactcccggggcgacggaggctcgcttcacggacccaggacgcggcggccgcaggaacccggtgaccagtaagcgccctgctcggcagcacggtcccgcgtgggcggaaacggctccgccctttcaccctaaggggcgggccttccgcctgggcagcggcgcaatgcggaagagctggacctgctggagcggaagtgacgcttcgggcggctgtagcggcggaggcgagggcgggggg

SEQ ID NO: 50944 - DNA, 635 bp, Mus musculus
  source 1..635: mol_type = other DNA
ccaaaagataaggcgtcacctttttttttttttttcttaaccaaaaggcaaaaggaaacgcatttaatttatgtttccccaaagggaaaatctgtagcgccgatccctaggcggaatatcacaccgcggactctccagggcggcggcgaagggcagggaaagccacacaggtgactgccgcctcctgcccaccgccactcaacgagatcccggggagccggggggaactgaggcaccgggcgcttcagcgcctccattaccagagatacccgggagcctgtgccgacggggtcctttcccgcccgctgggtgacagccgctgtcacggcaagccacccgcagccccggggtcccgccgccctcggccctcggccgcctctcaccgcttgcgacccggctgcgacggccgccaccgctcaggaagcgtccacccggccggccggctgcccctgggtagagcccgggccgctccccgccccccgccctcgcctccgccgctacagccgcccgaagcgtcacttccgctccagcaggtccagctcttccgcattgcgccgctgcccaggcggaaggcccgccccttagggtgaaagggcggagccgtttccgcccacgcgggaccgtgctgccgagca

SEQ ID NO: 50945 - DNA, 472 bp, Mus musculus
  source 1..472: mol_type = other DNA
gagagcaggagaagacgttgctctgctgcccaccattgtggagaaggtcattctccccaagctgacaggcacagacgttacataaccaatgttaggtgtcaggtgtcagtaattgatagatccgaatattatatacacatctcttttgacaattatcttgaaagattagcatttactgatacaggaacctattttaaactgaaaaaaaaagtaaaagtgaaatttaaatagaaattttggttgtgtaaaaatggaggagccttctccccctccctcagaatccttaattcataggacaaaggatgatgctgcccttctgtaaggccagcagctggtggatgtgccacgcttcactaaaccctggccttttttaaatgaacaaattctgaagtttgtattataaagcacaaaataaatactggtatttatgagtaaagaagctgctcttacctagtaaagatgttttatttta

SEQ ID NO: 50946 - DNA, 379 bp, Mus musculus
  source 1..379: mol_type = other DNA
atttgccctctgtgatatagtctgaaaataagacaaatcttgtttcagaaattcactatgcttcgtaaaatagttaaaatagttgctacctaacttggctttctggctgcggcagcagggagattggccattctggagttccttatgtacatcaggccggcaccgaacctgctagcatcgcctcgcgttattaagaggcatattaaccatggctcaagtcactgtttaccctgcaggcactgagtgggagggaggctgccacacggagacgacagactactcgctcctctcatctcggggtaccatgagcccaggcgcatgcgcaatcgaggcggcgcgatagctagccagagccgcgacgacccggctggtggggggt

SEQ ID NO: 50947 - DNA, 224 bp, Mus musculus
  source 1..224: mol_type = other DNA
accaagatgttggaacaggttcaatctaaactttataatgaattgcgatttcttgtgcaaggccatgcccccacctgggggcgctaccgcctgtccccaaagctgcagcaaccacaaatggtcacaaactccaggtgtggcaagcaacctcggtgtctacagtgacaatatttatattgaaagttgcggcccctcgggccggcccagccaccgccgtcgctgct

SEQ ID NO: 50948 - DNA, 470 bp, Mus musculus
  source 1..470: mol_type = other DNA
caagattggaaccttcatgaatgaaattgcctggaagggttgtgaggacatccctggaaggggtcatctatgagccaggaagtgccccttcctcatctgatattgaatataagactagagtcttagactccaaaagactaagaaatggtttagttttgtttggtcgtatagccctggctgtcctagactctgtagaccaggctggccggcctaagaaatgtttctaagccatccagtttaggacattttgtagcaaaatgaatgaacacagatttttttttttttacatgtttacttactttctggcttctagcatttaaaaatgcagaaagagaaatgaattcatgttctctttgggtctacagcagcagtagactccccgtttcttctgaaaacaggttctctcctactggttaataaaactggtaggccagtcagcttccttctggctgccatggaaaccaagcagc

SEQ ID NO: 50949 - DNA, 268 bp, Mus musculus
  source 1..268: mol_type = other DNA
tgcgtggcgcacgcctttaatcccagcagcaggcgctgagttttaggccagcctggtctacagaggacagccagggctaccgagtgtctgacttacatataataataaataaatccttaaaaaaaaaaatttttgtttgtgtcctgtgtggaaaattataatttgacaagcgttatcagataggtattgaattcgagatcctcctgccaaggccttcctggaagacactacctagtctgcccatttgtcgccggctccgcccgggccc

SEQ ID NO: 50950 - DNA, 428 bp, Mus musculus
  source 1..428: mol_type = other DNA
atcagcctggtggactcctcgctgatgcattttctttattaataattgatgtgggagggcccagcgcactgcgagctggcaccattcccagcaggtgggcctgcctgcgcctgcagaaggaagcaggttagagctcccctcagttggagtgagattggcaggtgtcagccaagggaactccctttggttccagtgcttatcacagcagtgagaactaagacattaagggtttaagttttgcaaaaagcaaacaagtcctggccatctgttgcaaaatcgtgtcaacagtcaggcgttttaacgacttcatgttatgaatattagactgcagaaggaacaacctaaagctccctcccttgccctcccagggcgggcgctgtggcacccgcgcaggcgccccactgggaccccgccaaccgcggtccgtg

SEQ ID NO: 50951 - DNA, 292 bp, Mus musculus
  source 1..292: mol_type = other DNA
cggactttttatcctgtgtgataaaaatcccatttaaattttatacgatgtttgaaattgtcagtgtaatacaaaagtacttttcatacaagactttatagtctttttgaattggaatgctttctacagcatttttgtggttctgataccattacaagattgtacaacttagacatgtctcaatatctttaagaagagcagcagggaagctgggccacttagcttgaggccgccctcgaggctccggtcctcagtggggctgcgggcggagggagccagaggggagtggcct

SEQ ID NO: 50952 - DNA, 246 bp, Mus musculus
  source 1..246: mol_type = other DNA
ccaaaaactgttggatccacagatctttaggacttgttcatttcatgagtcaaacagtgtcttgttttaacaacagttgtcatagctgcaataataacagagagagattgattctctggcagcccaggctggcaaattttatttccatagcgtagtcttgaggtatgtaagtaaataaccttctaggtgtgataccaccgagggtgcccggcacccgtgggttcccacactaggttcactacacct

SEQ ID NO: 50953 - DNA, 366 bp, Mus musculus
  source 1..366: mol_type = other DNA
cataacaaataagtttcttacttttttttttttactttgtagaccaggctggcctcgaactcagaaatccgcctgcctgctgaagtttctttataagatagtatggcctccatgggtaccaggcacgcatatatgtacggtgcacatatatgcatgcatgcatgcatgcaaaacactcatcagagtcatttgatccacggcctccagggtaacccccggggcagaaggaggaggggctgcgcaggcgcactgactgcaccccgctttcctcaatgctgggcagcagggacctcaaagtccccaggccttgactggaccgcgcccggtactttccgagccgcttgctcgcggagagagcgtggcgtc

SEQ ID NO: 50954 - DNA, 505 bp, Mus musculus
  source 1..505: mol_type = other DNA
ggttttcaacacgtcctgttgagaggatccccacaatttctgggtcttgaaattctcaagtcatagttcaaatttttgctagataatttcatcacgtatttggaagggtttgggggcccacgactaacccctagttcaaggccagcttcaactacagtttaaagtggcttcctaagactgaggcctcagcggttaggagcaatagctgcgctctgccaacaggctggccactggggaaggctcaggctgggagcctatccctgccctgctctggggagagggagccctttgcttaaaaggattcaaagcttagcacagaaggatggtactagagatctctggccacacattggatcggcgaggtgccgagtcaccgggtgtgctgggctgcgggggccgcggttcccgggaacaccggggaaagtccccacgggccgggcgggggcggggccgggcgcggtgggggcggggcgggacgcaggcggggcgaggcggctctgcggct

SEQ ID NO: 50955 - DNA, 523 bp, Mus musculus
  source 1..523: mol_type = other DNA
tagctctggtagtgtgtgtgcataatcccatactccaaaaaggaatttatgcagtgaatatttattgaatacctaaatcctagattatatacaagaactacaggagtatcatgtcatttgtgacagttacgtgacacaaaaatctttttgctttactctatgtttttaccttcaatgtagtagtaacttggactttgcatctttctttaactgcatttatattctgtggaaatgtggtttttgaagttatgctgaaaaatccaggctatgtagctttgctttgcgggtaccctcagaaaaccagtactgatcggcagctggtgaacaatgctcaactgctgatatgcattacactactaccgcaaaccgcagcaggagaggtccggacctcagctccaggacgcaggtagagcaccgcgccagcgcacgggtccagccccgttccgcctctgaggtccgcctcctgcggtgcgcacggcgcctcgcccccgccccaccggcgccctggcctcccgcccgccgc

SEQ ID NO: 50956 - DNA, 269 bp, Mus musculus
  source 1..269: mol_type = other DNA
ccagcctggtctacagagtttcagactagactggcctcaatttttttaaaactatcccgccagcctggtctacagagtccaggacagccagggctagagaaaaataataataattaataaaaataaaataataaagaataaaataaaaccaaagacacatttttcccttctttttactccctccttggctgggccttaatccaaacttggttgaaggaaagaccatctttctaggcatttaaaacaatttactgaggtcagtggaaagc

SEQ ID NO: 50957 - DNA, 594 bp, Mus musculus
  source 1..594: mol_type = other DNA
cgccggctcccagcatgcctcgggaggagctcgtgagggagcgtccgcacgggctcgctccacccacgagcaacaccggcccgctctcctccgctgtttctgagccgccggggtagagctgctgacgtttgcgccgcgcacgaactcggccgccatacaggagaagtcgctcccgaggcgaccgcgacagcttcggctgttgatcccctcagcctgcggggactcctaagaggctttctatagggaagaaaagcctcggcttgtccggcacgtggaaaggagccattcccattctgcctcgatgcttgctataaccggcctcgcttctaaacgcagtgcgcttgagctgctccggagtccagccctggccgctccgccctggcgcttggtgagcagccacagtcaggcagcctcggctctgcccccagtgtaggaggctctggggtaaacgcaggggacagcccctgacgagccccggctaggcagcgggctccgaccgcaccctaaggcgggaggaacccccacgggtcgcctcgcgggcggggacctaggcgggctgcggccaatgagcagccgagtccatcggaggcgggg

SEQ ID NO: 50958 - DNA, 660 bp, Mus musculus
  source 1..660: mol_type = other DNA
gctccggctcgcacccgccactcgcacccgccggaagttggcccggggaatccagcgcgccccggcctctgccccgcctccgatggactcggctgctcattggccgcagcccgcctaggtccccgcccgcgaggcgacccgtgggggttcctcccgccttagggtgcggtcggagcccgctgcctagccggggctcgtcaggggctgtcccctgcgtttaccccagagcctcctacactgggggcagagccgaggctgcctgactgtggctgctcaccaagcgccagggcggagcggccagggctggactccggagcagctcaagcgcactgcgtttagaagcgaggccggttatagcaagcatcgaggcagaatgggaatggctcctttccacgtgccggacaagccgaggcttttcttccctatagaaagcctcttaggagtccccgcaggctgaggggatcaacagccgaagctgtcgcggtcgcctcgggagcgacttctcctgtatggcggccgagttcgtgcgcggcgcaaacgtcagcagctctaccccggcggctcagaaacagcggaggagagcgggccggtgttgctcgtgggtggagcgagcccgtgcggacgctccctcacgagctcctcccgaggcatgctgggagc

SEQ ID NO: 50959 - DNA, 581 bp, Mus musculus
  source 1..581: mol_type = other DNA
acggaatgaataaaattagaagttaactcagaacattttctgtcatctaggacttgtttttttttttttaagtaggaattgaaataaaatatgaagtaaatttattgatgtagttttaaaataacttactatagtttgagaacaaagcagttctgactggcctgaaactcacagacctgccaagaaaagaatactttaaaaatactattgcttttgtgaccacatgtgggtaggtagatactgcatctacacacacacacacacacacacacactcactcactcactcactcactgtgtgtgtgctgcttactccctgaggcatctcactgctcccgaggagaaaaaactttagattttaatggaacagctttttcttttccatctgccaggggtaaaaatagaccttaaaacataattaaattacttctaaatgggtttttgtgttacaccaagaattattttgatgcagacttcaagttgtataaatattgagaaatggaaggtttactgctttatagacagtatattactttgtaagtttttattcacagtaaggtaattatattgtggtttctatat

SEQ ID NO: 50960 - DNA, 430 bp, Mus musculus
  source 1..430: mol_type = other DNA
ctagtgtgttcttaacaatggattagcctagctgttttaaaagatgatgaatttgtaagttacttgtagttagtagctaccacctcttagagcttaactctgagatgctcatggataagtcctactggcctggagcccaccagggaccccaccttgtgccaacacagctggctttcctgaactcaggctcagtagttttatctcttcataggtatatgattataaaggaaaaatattaggtataatagtaaatttgagagcacaaaagcgttctgggaacttctctgctgcaatgaaagacttatcaggtgagcactgccctgtgtaccttcaattcacaattcctgcaaagttgatgggaatcttttctctctacaggcaaacatcctgtgtctgcgagaaggtggcaaccacctgaatttctcttggt

SEQ ID NO: 50961 - DNA, 570 bp, Mus musculus
  source 1..570: mol_type = other DNA
atgtttggttatttgacatatttgaaaaatacttccaaaattaatgtgcaaacaatccagataatttttttacaaaattctttccattaagaaaactgctttcagcaaaagacatctgtcacatgcttttgctataccaaacgtcatttgattttgttatcaacttcaaagtatctaatccactggcatttaaaatgtttttaaatattcattcactctgaatttctccgagatcatacggaatcatagtacctggtcgcctgcggctagcctgaagctggcggacattggcccatcaccgtctctctcagaatgatattgcggcttctcacggagagaccgggtgccgcgcgccgccgtcgcgttctcagcgacgccgacctcgcagcaggagagccgcgagctgcgcgcgcccggccggaagcggccaccgggaaatctgttgggcggggcggcacggcctggcacgcatgctccgtcggggcgggcccgtggcggggcggggcctcaggagcctccagtccgtgagcagcgcggggtctgggcggggccggggcgcgcgggaagccc

SEQ ID NO: 50962 - DNA, 642 bp, Mus musculus
  source 1..642: mol_type = other DNA
tcacctggcacaccatttgacgcatttaataactgatacaaaaatcttagaccaaaagttccaaaaaagctttatgagcacagtaatttcaagtgcctgagaaaaaccccctccccgctcaggacatcagcctgcggcggctgttcccacccctgacgcccggctgcgggacgcggagactcaccgggcccgacgccccctgaggaccgcggagcggctcttcgctggcctcgtccgagactcgcggccggttgtccagggggcgatggtcgcggcggcgcctcctctgccgccggcggtcgggaaggggcgcaagggcagcccagccgccagcgcggcgcggcggggcgcgggctccggcagtgaggcgggcacggcggcaccatggtcccgagaccttttccggcggagccgcacggtctcaggcggcctcttgaagctaggcgagtagccgggcaccgagacagccattgcgcagcaccgaggcagctccgcagccctgccggggcttcccgcgcgccccggccccgcccagaccccgcgctgctcacggactggaggctcctgaggccccgccccgccacgggcccgccccgacggagcatgcgtgccaggccgtgccgccccgcccaacagatttcc

SEQ ID NO: 50963 - DNA, 351 bp, Mus musculus
  source 1..351: mol_type = other DNA
tctccgggcgggtgcgcgcggccgcccctcacacaaatcagtgcagcccgcacgccgcgcggaggaacgccgagtccgcagccgcgcacaccatccccgcccgcccgcctgcctgcctcccggccgtcccggagcccgctcgggatgctcccttgcgagccgccgtactacggagcaaccaagctgcgcgtccgccccacccatagatgggcggggataaccgcctgccaatcggacggcggagaccacgccttcgctctctcctatgactccgcccactaggtgggcaaaaacatcaatttgcataaaacccctggggcggcgacctctctacagcagactgtttggacc

SEQ ID NO: 50964 - DNA, 452 bp, Mus musculus
  source 1..452: mol_type = other DNA
gggcggagcggcgacggcggccgcagggacgcgcgcccggccgctggacccgaccccggggcggccatcgccgacccccgcccgcgcgccaggccgcccgcgtcagctcctcatctccgggcgggtgcgcgcggccgcccctcacacaaatcagtgcagcccgcacgccgcgcggaggaacgccgagtccgcagccgcgcacaccatccccgcccgcccgcctgcctgcctcccggccgtcccggagcccgctcgggatgctcccttgcgagccgccgtactacggagcaaccaagctgcgcgtccgccccacccatagatgggcggggataaccgcctgccaatcggacggcggagaccacgccttcgctctctcctatgactccgcccactaggtgggcaaaaacatcaatttgcataaaacccctggggcggcgacctctctacagcag

SEQ ID NO: 50965 - DNA, 213 bp, Mus musculus
  source 1..213: mol_type = other DNA
cgcccctcggcggcctcggccaagctaggcctgagccagggcatctctgaggggtccaaacagtctgctgtagagaggtcgccgccccaggggttttatgcaaattgatgtttttgcccacctagtgggcggagtcataggagagagcgaaggcgtggtctccgccgtccgattggcaggcggttatccccgcccatctatgggtggggcgga

SEQ ID NO: 50966 - DNA, 414 bp, Mus musculus
  source 1..414: mol_type = other DNA
tcttcatctgaaggctgctagtggaagactaacttccaggtagctaggatgagggtctccacacatatgtgagcaggcagggtgcacaggcatcagtggctctgcgtgctctcagggcacacgagcacgtggcgtagggcacctgtcctgcctgagttaacggagtactgtcatccttggctccctcgggtaagtgagccggagaagagcagctgctggctgccagcagggcgcctggctcgtcctcctgctgaaggagtgggctgaaggcccaagggcaaggccactcactgcccgcaaagtgtagccctcactgagcctgaggctgctcactgctgccaacaagccgtggccatgacaccctgggccacagctacggtgggcaccatgcaggagaacactgtggtttccatg

SEQ ID NO: 50967 - DNA, 405 bp, Mus musculus
  source 1..405: mol_type = other DNA
ctgcagaggacctgtgctcagtaaaacaatttctaaaagaatgtatttgcaacccatataattttatccatcttccctcatattaaaaagtaaattatatatagataaattatatatagattttgagtctgtgggtataaataagagcactaactgctcttggtgtatctgaagacagctacggtgtacttatgtataatataataataaatctttgggtacagtatactcatatacatgaagtaaatacttttggtttttgttttaagtaaagcctgaagcattgctcaacgatgttgacgatgcatgtgcaaagagtttaaatctaaacctaatttcagacttaattttctggtgtccagccggaccgcggcaaagccgagcgatcacgctggcgcgcgcgcg

SEQ ID NO: 50968 - DNA, 456 bp, Mus musculus
  source 1..456: mol_type = other DNA
agccctcagtaaattattagtaaattattattagagcactttaaagttacaagaacatttcacttaaagacccttttagttttcagggaatccatagtttcctttaccagaaaagcaaggataatattgggtcaggctaggcacacacagcaaatgcctacataggccttcctccctggagacgcgggcgaggggcacacagagaccgcatcgcaccgcaccgcaccgcggcgcacgcgcactcgctcgcctagcacccgggaagggagggtgggcggggacgggtgcgtgccgagcgaggagacggcctccgacgggctgctcgagaccgtgtccacgctccgcaggctcgggggcaaggcgccctccgggagaggggcggggcggtgccgggtgggcggggctctcggtgggcggggcgagccgtctgcgcagctgccggagcctttaaacccg

SEQ ID NO: 50969 - DNA, 273 bp, Mus musculus
  source 1..273: mol_type = other DNA
tgagagcagtagctcatgtggctccagaacattgaaacagctcaatgaaagacttgcctagatcagatttgatcagaatactggagcccacagaccttcccttcgaggtgttggggaggctcacctggcagtatgcaatccagatcaggaggtgttggctgaagggttggaggctccatccatgcagccctggggaaatcttcatccaatcatgggtggagagttctattgggggtaaggttaattcccggctgccagccagtatttaacttt

SEQ ID NO: 50970 - DNA, 418 bp, Mus musculus
  source 1..418: mol_type = other DNA
tacacatctgagtagtacttcccagtctcgcaacttatggcgagccccaggtctggcacgagctggcctcagcctcgggaaagaaaaaaaaatcctttgtgtttccgtttcatcatttgtgaaatattacaattatagtgtgtccttttagttaaattaaacgacagtctcaacggaagctaactttcttatccgctcccccctccacagaagagggagatgaggtggaggtccagagccttggacagggctgcttcaaaaaacctgggacctattgtcttcagctgtatagaacaggagtcaatgaccagtggacccctgcggaccaccctcagggttcctacttggatttctgcagtagcctcagattcctgcgcaactggcctgaagcccatagcgcctgcgcttggagtgcggg

SEQ ID NO: 50971 - DNA, 297 bp, Mus musculus
  source 1..297: mol_type = other DNA
taggctggcacagggtccagccttcttggttctgtcatagacaaggacacagcttggcaagctgtcccctacagcagtgttaccgttgatgtgggcatgcacatgcaccttaagaataatgtactttatttcagtaaacaaaatactggttcttctaaaaacatatatttaaggagtccacgcaggctctggacaagctgctagcctgacagacaggctagctcccgggtcagcgtggctgtgtgcacactcacgcttgtggcacctagcggacccttcagctcagctgtctgccct

SEQ ID NO: 50972 - DNA, 335 bp, Mus musculus
  source 1..335: mol_type = other DNA
accgcacacttcgtgtcttggctatggtgatagcctgggtttgcctgagtcccaagaaagccctggtccatcctttagctttgattaaaggggaaacgcaaactgccattttctccaagtatcaaaaattatagcaaatcagatgtttttcagataatgtactgaatcatctccattaacggcagtccctctgagggacaggcacatagcctgcctctttttcaaccgttgctgtaaaggtaggtacacagtttggaaataaatagatgggtagaatatccatccatctccatgttctgcccctgacacgtagctatggtacagcgtgagatgtc

SEQ ID NO: 50973 - DNA, 254 bp, Mus musculus
  source 1..254: mol_type = other DNA
ccactgtggctcagccaggagcccataggggctgtggtcccctgttgactcacacctgtcaggcgggtgggcaacttcagagcttgctggtgggggctgaagttcccggcccttggggctgagtgcagcgtgcagggtgcagggtgcagggtgggcgacctaggctggcagatagcgagccaacctggctggaagccccagggctctgtgaggctccgcccacagcaagctgagtgcctctgggcttgtcggtc

SEQ ID NO: 50974 - DNA, 486 bp, Mus musculus
  source 1..486: mol_type = other DNA
ctaagaaactcttttataaattgtttggtcgtggtattttatcacagtaacaggaaagtaattgatacacatagctttttttctttttcttgagatactaaagcagaaagggaaaatacagtgttatctgtgtatacacaaaatacacgatatatgtatgaaaataattattgaaacccactcattttgtgctaaaaaatgcttctaattatccaaaaattggacagttaaacataaggccatatcacgatgttactgcctctaactagatttagtttaagtcctcgccgcgtgggaaccgcagaagcactggccagaggcctctgcccctaacaaatatggccgccccaaggcttcaggcttagggcggcagacaaaaatcccgtcgtattactacgattcgaggccggcgagcgcaggctggccgcccctcccgcgcggggcggaggcggacagggcgggcactggaaggcggcgtcccggcgc

SEQ ID NO: 50975 - DNA, 453 bp, Mus musculus
  source 1..453: mol_type = other DNA
gtgggtgtcatctgcggtctggcacccccatccctcgcaggcacaggcctggccggacatgcttcctccttttctgataaaaagaaaaagcatttaatctttcatggcttttcatccagtgaaccacatgcagagctggtaaaagcgctaaaatgtttctctgatgcccagcaagacacatcagttgaggtttttcaggaaataacagggctagcaagacttgccaggtctctcaaagcctcaggactccctggaggctaatagctgtttacagccactgagtggaattactaccagcggtaaagcttccaggctcccttaattagcatagggaaaatgactaaggtgttgacgtcacctctttccagtaccaggtttgctgtccaggacgctctggaagccaagccctccccgcccccagggggctggctctccgcggagctttttaagctg

SEQ ID NO: 50976 - DNA, 323 bp, Mus musculus
  source 1..323: mol_type = other DNA
aaatgttaataatgtttgcatctatactcatcagcaatattggtctaggtttggggtgggaggtcctctctctatcaattcagtggaatagttttgaaaacttctctgaaagaagttgattcaggggctggagaaggagaggtatccgtctggttctcctcccctcgttcctggaactcacagaaatgggagggcagccattcctccctttggggattccactcagcatcagagtcgccttcatggtgtttactgaaacttgaagctgttccagaaaacgctaaagaaggctgtcattggctagcttcccaggccacccaaag

SEQ ID NO: 50977 - DNA, 266 bp, Mus musculus
  source 1..266: mol_type = other DNA
agttactcttccaaagagtaattatccctcgaggctttattggtacaaacaatgaacagatagctgcccacaggccacagctctgctgagtgaggaaatttgataccgagctggtgcccagcatttaagtgatgagagccgcatccgggctcagcagcaagttggtgccaacgttgaattgctgttgaataaacagcaaggcaatctttatctaaataatcagttgttacatcacttaagtcacgtgattggcaagagccaatggc

SEQ ID NO: 50978 - DNA, 531 bp, Mus musculus
  source 1..531: mol_type = other DNA
gccggaggagggtggagagctcatgagttcggggtgcgctgcgcacactcagaacgcggcgcgctgcgtaatcaagccgcagcccaaaacttctgcgggcccagggaggcgctcagagcttcaggaccccaagccttggctcatggactgcagtgcaaggctgcctagggaccattcccggatgccagcccaggtccctgaacggtggcagctttgtgtccagggagcacagggcgtctccctcccgctgatctccaggcccagggcttctccggacgcagccctcggtccaggaccgaggccaccagtggcgccgctgcgcccggcaaacccacccagggcgagtgcagcaccgcgcgtggctgcctggcgtgggatctgaacctgggcctggcttcgggggacggtaggggctgccaccgagtcccgggccgggcagcgtacagtagcgcgcgggggcgcgcgggccaattccaggagcgcggcagccggccgcgcccaggctgataccggggcttacagtaaaagcac

SEQ ID NO: 50979 - DNA, 201 bp, Mus musculus
  source 1..201: mol_type = other DNA
agcacagaaatgcctgtccaggctgtctggacagatccaatgtactgcaggcttcagctgaccagagtgtctctggtgagagacattctgacagaacagtgtctacagacatcatgatgcagaactgtcagagtgtaattttccccttagaaaatatttcttttatctagagatgatctaagctgagacccatctcaggag

SEQ ID NO: 50980 - DNA, 281 bp, Mus musculus
  source 1..281: mol_type = other DNA
taatttaggccgactacctttgaggtgctggctcactttctccagcaatcaagggaatctccatcagcccctgaagatgaattacattcatgttctgaacacttaaacctcaggctcatagcagtgagcttcttgaatggaaaatcaccttcataaggtcagagagcatgtttgacctctgcccatagatgtatctaaggggctcctttaacttccacactgtacgtgcttacaacgtgccagcacagaaatgcctgtccaggctgtctggacagatccaa

SEQ ID NO: 50981 - DNA, 301 bp, Mus musculus
  source 1..301: mol_type = other DNA
cactcctttgccctgggcctacaaggcagccacctaggcctgggcgtttgtgtcaaatcaaactattcctggtagctttttacagcctttaggagtccttgaaaacatacctgtgttttaagcaaaaggaaacgactttaaagatggatcgttctttacagatctaaactaatgtacctgctctgtctcccgcagccgctagctcaggcagagacggaagaggatactgcctgcccacggcctggttgtgagcacaaatcagtaacaaagattcatccttgtgtcaatcatacaacacgga

SEQ ID NO: 50982 - DNA, 468 bp, Mus musculus
  source 1..468: mol_type = other DNA
tttttttctagataacatctttaatcagaagcacctcagaggaagctgaggccccaacttgtgcctccctgatatttgtacaaaaactccagtgttttcaggcccagcactgggggcagagagctcaaagcagcagattctgattcagagagatgctgcctcccccaacactcacatcctgtaagaggatttctggcggaggcagagatctggatgctcctcccttcaggctggagaggcagagaggaaaactcacgtttctagaaatgtagcgtctgccacagtgacaggggtgcttggccgcgtggtaccagttgtgttagaaggtggcttgtatctggacagatcacaccacagctctgggccctgccttttattcaggccgggaatatcaggtgcgcaggtgaagtgcgcaggtgaggcgcatgccatggcaacagacgcatgagcgtccctgttgcctagggg

SEQ ID NO: 50983 - DNA, 262 bp, Mus musculus
  source 1..262: mol_type = other DNA
tttctctcctggtcagtaaatgagagctacagatcagaataagacacagacttagtaccgccactggaaacacatctgtcttggtaaaaccttgtctatgcacccggggcacgtgagccatctgtaaagagcctgagatttcatctcatccactgtcatcaaagcacgtggccaggaccactgggcagcccagtcggcctctctcttggcatatgtcaaggactcaacagaacaggactcagccatcttcactcctgctaag

SEQ ID NO: 50984 - DNA, 279 bp, Mus musculus
  source 1..279: mol_type = other DNA
cctgacatcagccagtggcagtgtccagcttaaagcatgaaatgtgccttttcctgacctcgtgacaaagtccctgtacttttactctgaccctaacagttccagtaacagtcttgggacactgtctgaatggaccgcctgggtcctggcagctgggagttgcgcatgcgcgtgccagaggcgtaggctcgccgcaccgcagccgctggtggagcggtctgcgtccgtaccccggcttcgccgcggtttgggcctggcgttgcctgggcaacgggagcg

SEQ ID NO: 50985 - DNA, 263 bp, Mus musculus
  source 1..263: mol_type = other DNA
aggaatgtttcctgcccaagaggtgaattcaacacaaattgccaagttcctacaacttaagtggcagctttatgttattttttttaaacaccagaaagaaaacgtaagctgaatgcatgatttccaggtgccagcaggaaaaagcctgagatgtcagtcatttgacctggccggttctttcgttgcatggtaaacttttatttaaaaaaaaaacaaaaaacaaccccaccagccacgccccccgtagggagggggcttatgcg

SEQ ID NO: 50986 - DNA, 481 bp, Mus musculus
  source 1..481: mol_type = other DNA
catcccagtccctggaacggtactgagcttagggtgggcctcctaccccagtcagcctaactgagaaactccctcagagacaggctgagagagaggtctgtctcctagatcctctccttcctcacctctaatcactgtgagtgaggacttaattgaggtctgattgcgtgcccacacttctccttgggagatgatctgcatacgtactacgtgggggcgcaccgagacctccagccgcgagggctcgcccaactgttccctgaagtccctgagcaaaccgcggggtgtgtagaagcaaacatttgcattctgcagagaacgacgggtttcctttgggagcagcgcttgtccctgaccactgcttagctcggaaccaggatctctacactggccggcgggcgggcgggcaggcgagcgggaggaggcggacccttcgggaacagacggctcctcctcagaggggagggacaggcttctcaag

SEQ ID NO: 50987 - DNA, 266 bp, Mus musculus
  source 1..266: mol_type = other DNA
agcactagatagctctttctaaaattttcatggaataggctatcactgatggcagcgctgctgctggcgtcatcccacgatgaagattgtgggtgtggtcctgacctgggaaggccctgctcccagcactggcagctccacgcgtccagagccccagggcgcggccccacgccgcagagagaggcgccgccataccgttaaggctccgcccccgccccacgccgagggcctgcctccaggtcccgccccccgaggtcccgccttcc

SEQ ID NO: 50988 - DNA, 148 bp, Mus musculus
  source 1..148: mol_type = other DNA
acgggtgtcgtggtggcggggtgttccccaccaccaccaccacggtccaagcttgacccaagctaagtgtgggtcacatgaccctcagtgcctcagaagctcagtggccagccaacgctgcccctgggcaccgtgctgggaattcttt

SEQ ID NO: 50989 - DNA, 481 bp, Mus musculus
  source 1..481: mol_type = other DNA
acaggttttaattttacatccccttattaatttaaaagtatttaagtttttacaagcctacagttaaaatacatcccatactgtagtgtttaatagacagcggtctataataaaggatactaaattgtttatcagcagaagatgaactgaactttttttcgtgtttctctgtgtagccctggctgtcctggaacttttagaccagtgcctctgctttccaagtctggaaaacttttataaataaaaatatgactatcgttaagactgcagtaaatactctttttcaggcaaacccaaaaagtaattattttcttcattttgtcctgcagctacgcgaggcgaggagctcgcgcccgcccgctcacctacgcatgcgcccaacgcctgggtcctgcgcgcgcagcaggtcaggcccgctcgggcaagcctccgcctttgcccgaggcgtccgccccggaagtgggcggggcgttgaagcccg

SEQ ID NO: 50990 - DNA, 489 bp, Mus musculus
  source 1..489: mol_type = other DNA
agaatctttaaaaaatatgtgacattattgagaaggtcatggtggataaattaaccattacataattggaatggaagttcctacacattcatgaggcttgtgtagttaaggttgaccttgaactcctgatcagtgttgggattaccatctagatgtcccaaagtttcatctgccctataagaaatgttatatattttttgtttagctggagtgctgagatcaccggcaggggctggtgacagaaccgctgctgttggctaagcgtgcaatcagctgcctaccgtaaattccaggcgggaagatctgtccgatgagctggacgagcctggactcctccgaggcgcgggaatgggattcccagtcccaccggaagccaaggtgccgggagattgctggccactgggaggagggatgccctggaccctcccaccccgcccacgcggaggcgggacgccccggaactccgccccgaggaggcgtgaccggagg

SEQ ID NO: 50991 - DNA, 278 bp, Mus musculus
  source 1..278: mol_type = other DNA
ctcagggtggcaccaccaggagctgatgagagacattctcatgaagaacgtgactgcagagtgccatgggacaccacctgcaggcattcccggccaggacaggtccctgaaagcacatggggccaaccatcaggtggacggctcgggggatgcgtccctgtggccagcagctgcggcggtgaccctaccagccacagcttgaaagtttgcctcagcagggccaccttgtagggcgcactggctggttaatcttctaaccagagggcatgtgtgcccac

SEQ ID NO: 50992 - DNA, 449 bp, Mus musculus
  source 1..449: mol_type = other DNA
gttcgggcgaccgcgaccgcctgagcgcccgaggggactgtagtgcctaacctagtgtggcgcagtgggagaatgcttgcactcagtgactgaatctcaggcgtcgtgcacgcgtgcgtgtggatgagtggaggggaaaggagtaatttttcctcgggccacccctttctcgcggatcgtgggccgcgcccgcgggtgacctgcccggagcctccgtggaaaccagcactgcgcccggagcgggtaggcgcgacgcttctcgtgcactcaccacggcttaccttaccccgggagcgcgccggtctctcgtggggacagtccctggaggtggcgacgcggaggcgcgccggcgactcacgggccgcggcgggggtcggaggcgaggctcaccgcccccgccacggcccctcccctcggtcccgcgcagcccagtctccgcccgaaggcgg

SEQ ID NO: 50993 - DNA, 144 bp, Mus musculus
  source 1..144: mol_type = other DNA
ctacaaattgtttgtggacagggggcccacagttaaacatatgaatccatgtaattaatagcactttttgaaggtttagcatgatctaataaaacagcttcacctgataacttcccagtgcacactcccgaagcctcgcttccg

SEQ ID NO: 50994 - DNA, 439 bp, Mus musculus
  source 1..439: mol_type = other DNA
ttctttaaaaggcacccacatctaggtgtttttttattaaaacaacaagaaaccactgacaccttaactgtgttcgtgagttcaatattcagggcttttaatactgtaaataaaatttgtaaatactagtttttaaaacccgagtcacttaatttaaatgtacccggggtcctgactggtgacccctaacaggaagcacccctcccctaaggctttcgtcggtgcggaggttgcgtgtagcgaggactctgtgccccacactcaccacctctcacagtgctgaaagggagggatcagagccccgagggcagcggccccaggagttgctcagcagtggggaaaattgttccccgggacgcgcagccgccacccgtcatctcggaggccctgtaggccgtctgtcggggcctccccgccccgccccagtttttaaacctgg

SEQ ID NO: 50995 - DNA, 765 bp, Mus musculus
  source 1..765: mol_type = other DNA
ggtgggggggagaggcgcgcacacacagaccaggggcagcgcgcacgcgcgtcaccgcaattccaaccccgcgcacgccacagggcccctacacagcgcacctttggggaccctcgaggacgcacgcgcgcgcctgccactgcagcctgccgcagcggcgggtgggcgggcgcgcgcgggtgctgaggagggggcgcgcacaccacaggggaaccaccatcctcagaggatgaaggacgcccacgccgtcgtgacccagaggcgcgtccccgagcgctcggaacgcgggaacgggtacctgacccgggatgtcaccgcaagggcggccacaccccctcagcgcgcgggcgctcggcgagacgcgcggcgacgcgcacacccacactcaccacacacccacggagggaggtgtggagcgccccgatgcccgggcatctcggctgcggcgggacgcgcagacgcttccgtgagccccgccgcgcgcagggtctgcactcacccgggcccgcagcccgcgagcctcagacgcgggctgccgacgcctccggccctccacgtcaaccagacccgcagagcgaacgctccgcggctcctgaggcgggcgggtcacgtggcttagggtgcgcatgcgcagtcgccgcgtcgccccctcagctcggtggggtgggtggtgagaccgtgctagccccctcgctgcggtcgcggtgcgcctgcgccaagcggcgggggcgcctgccagcctcccacgctgcgggggtagctgag

SEQ ID NO: 50996 - DNA, 735 bp, Mus musculus
  source 1..735: mol_type = other DNA
gcagcccaggcctcagtgacgtcgccagcactgcggagcagcagccctgcgcaggcgtaggggggaggtggggtggggggcagctctgcgtccctcccgggtcctcccagaaacgggggtgggggtgggggggagaggcgcgcacacacagaccaggggcagcgcgcacgcgcgtcaccgcaattccaaccccgcgcacgccacagggcccctacacagcgcacctttggggaccctcgaggacgcacgcgcgcgcctgccactgcagcctgccgcagcggcgggtgggcgggcgcgcgcgggtgctgaggagggggcgcgcacaccacaggggaaccaccatcctcagaggatgaaggacgcccacgccgtcgtgacccagaggcgcgtccccgagcgctcggaacgcgggaacgggtacctgacccgggatgtcaccgcaagggcggccacaccccctcagcgcgcgggcgctcggcgagacgcgcggcgacgcgcacacccacactcaccacacacccacggagggaggtgtggagcgccccgatgcccgggcatctcggctgcggcgggacgcgcagacgcttccgtgagccccgccgcgcgcagggtctgcactcacccgggcccgcagcccgcgagcctcagacgcgggctgccgacgcctccggccctccacgtcaaccagacccgcagagcgaacgctccgcggctcctgaggcgggcgggtcacgt

SEQ ID NO: 50997 - DNA, 556 bp, Mus musculus
  source 1..556: mol_type = other DNA
gggccaggttttattcacattagcatcaagcctagtgctaaacagttcatgtgtgtacgttctaaggacaaacacattatttcctggttctcaataccattaagggccttggccggcgacgaattttccaccatcttcccttgcggacacagccactgcggatgttcgcgcgcgcgcgccactgcagctgagggggcggcgggagcgcgcgctgcggggaaaatgcgcacctcggaccctctgaggcgaggaaggggcccgggctggacagaggccccgagtcctgccctctcatgatgggccctgtcccagccttcgtgaggctcagaggaaacaggaggcccgggaccttgagtcctgcgagccgcaggcgcggctcagctacccccgcagcgtgggaggctggcaggcgcccccgccgcttggcgcaggcgcaccgcgaccgcagcgagggggctagcacggtctcaccacccaccccaccgagctgagggggcgacgcggcgactgcgcatgcgcaccctaagccacgtgacccgcccgcctcaggagccgc

SEQ ID NO: 50998 - DNA, 517 bp, Mus musculus
  source 1..517: mol_type = other DNA
agagctttaaaaggctgctataaacaccctgcaatacgcagcccaggcctcagtgacgtcgccagcactgcggagcagcagccctgcgcaggcgtaggggggaggtggggtggggggcagctctgcgtccctcccgggtcctcccagaaacgggggtgggggtgggggggagaggcgcgcacacacagaccaggggcagcgcgcacgcgcgtcaccgcaattccaaccccgcgcacgccacagggcccctacacagcgcacctttggggaccctcgaggacgcacgcgcgcgcctgccactgcagcctgccgcagcggcgggtgggcgggcgcgcgcgggtgctgaggagggggcgcgcacaccacaggggaaccaccatcctcagaggatgaaggacgcccacgccgtcgtgacccagaggcgcgtccccgagcgctcggaacgcgggaacgggtacctgacccgggatgtcaccgcaagggcggccacaccccctcagcgcgcgggcgctcggcg

SEQ ID NO: 50999 - DNA, 517 bp, Mus musculus
  source 1..517: mol_type = other DNA
catgatttttttagaattgctaggaaagatactgagaaacattttatcttaacctctttacagagaaatttgttatcctaaaagtgatatatatttaagaaaataataatcaaggaattcaacaaataccatttcttcacatcattttacgtaacaaaaacatcaagatttgactgagaggtccgtcgctcgcgcgcccgcccgccctggcgcctggggagtacccagaagcctccgcggccgcggagccgcgagcagccgcagagcgaggtcacctcgcgcttccgcctgagggggcgtagctgcggccctccaccaatcagcgcccagcaggtcgcaagcgcggggccacgcccctgcggttggcacggactcgtccgcccggaggatactggcggtggcgcgatgacaggaggggacacgttcctgctatcacttccggcgcagcctttcgcgccgcacagcccgacgggaaggcagccttcctgtaacgctgcgaagcggcctcgcccccgcc

SEQ ID NO: 51000 - DNA, 653 bp, Mus musculus
  source 1..653: mol_type = other DNA
ctttacagagaaatttgttatcctaaaagtgatatatatttaagaaaataataatcaaggaattcaacaaataccatttcttcacatcattttacgtaacaaaaacatcaagatttgactgagaggtccgtcgctcgcgcgcccgcccgccctggcgcctggggagtacccagaagcctccgcggccgcggagccgcgagcagccgcagagcgaggtcacctcgcgcttccgcctgagggggcgtagctgcggccctccaccaatcagcgcccagcaggtcgcaagcgcggggccacgcccctgcggttggcacggactcgtccgcccggaggatactggcggtggcgcgatgacaggaggggacacgttcctgctatcacttccggcgcagcctttcgcgccgcacagcccgacgggaaggcagccttcctgtaacgctgcgaagcggcctcgcccccgccgcggggcacgccgggagaacagagagcacactcccgcgttccggaagtgtgtgtgtgtgtgttcgcgcgcgcgcgcgcgcgcgcgtgtgggtttcgtgcccctgtccgcgctaagccacgccctgtgcccgaatgtggcgcgaaagccggtcacgtgccaccactgcggaaggcgccggaggggcgggttc

SEQ ID NO: 51001 - DNA, 171 bp, Mus musculus
  source 1..171: mol_type = other DNA
acccccaagactcttggctgtaggatttatcccatctcctccctgacatgaaagggccagtctccagatgggacctgggagtgagggatgaatgtattcattaaggtcattctcacctcagagtcactgagaatcccccctgagagcagcacccagagtggttatcagggt

SEQ ID NO: 51002 - DNA, 624 bp, Mus musculus
  source 1..624: mol_type = other DNA
cttcccgggccgcgcgggcggggctgcgggctcgcggcgcgggagcgcgctgcgccacgggggcgcgcgctggcccggccgcagtcggcgtgggagcgagcgcgggggcggggcgaggcggccgcgaggcggcaggcgctcgctcgctcgctcgcgcaccggcaggccaccgccctgccgttacccgagcaacaggccccgcccgccggcttggggccgggaggggcgggcggaggacgtcagcacgtcagctagcgaccgggtcggtccgcgggggtggcggcggcaaccgcggcggggggatccggggagactgctgccgtcgctgctgccgatcgcggcccaggtcgggctgagaaagcggactccccgagcgggggtgcgggcgccaccgccgccgccgcttgtgctgctgttcctgctgctgctgttggtgccgctgccgctgccgccgccgccgccgccggcgagcgggcgggaccggtgtatcgggggcgggcggtccgggctctcctggcggagccgccgccgccgccgccgccgctcgggccccggcgctgctcgctgcgcagcttcggagcgcgcgccattttgtgagatttacaaaaatcctcgtcgggaaga

SEQ ID NO: 51003 - DNA, 291 bp, Mus musculus
  source 1..291: mol_type = other DNA
cccaggctccctcaactttgggagtgtaggaaagacacagactggagatataatcactctctttctagggggcagcttcccggctactggaagggccacagagggcagaactgcaagcagcagctccctcctcccagtgtctttctccctgggtagagtctgacccagagagggtagggctgagcttgctggtccccactttcagaaagataatctgtttgtttatagtttacttaagcaaagggacctttaaaaaacggactttgataagtttcttcagaaatgaaccgg

SEQ ID NO: 51004 - DNA, 371 bp, Mus musculus
  source 1..371: mol_type = other DNA
tttagaataaaatatcattcactgctaagatgaatcccttcatcagaaagggtcaccttcttgattatagaattatcagccagtggtgtcaattacttttacagacccttgcgaaactatttctccttggtgagattatactcaggtgggggcagcagctggcactacgtcgcacagacttgctcttagatctgtgtgagcaaagtcttgggctgcatttcagcccaatggatggcagtgaaccccacttttcaattttcgtcaaagctaaaagagaagtcaagtttaggacttcagctagggtccggctccatctcttccgcctcgccgcgaagctgatcactgtgtcgcctcggttctccagcgcgcgg

SEQ ID NO: 51005 - DNA, 263 bp, Mus musculus
  source 1..263: mol_type = other DNA
cttcccggctactggaagggccacagagggcagaactgcaagcagcagctccctcctcccagtgtctttctccctgggtagagtctgacccagagagggtagggctgagcttgctggtccccactttcagaaagataatctgtttgtttatagtttacttaagcaaagggacctttaaaaaacggactttgataagtttcttcagaaatgaaccggagttccttagtaagaacttcagtttcttttatggtgccagaactggg

SEQ ID NO: 51006 - DNA, 430 bp, Mus musculus
  source 1..430: mol_type = other DNA
aatgtatgttctagaatgtagaatctagtgtgtgtgtgtgtgtgtgtgtgtgcactcatgaacacatataaccatatgtagtatgtatatgtatacctgtatataggcatatatgttggttcaggtgaacatgcatgctgggaccagctgattggcatatgctgaccagctaatgagctccacatgcttgcatagttgacagcatttgaaaacaagatcttgatttgatttttctttcataggtactaggtcctagtgctctggtgcagcctgtcacccagagtcacgcaggtcacacctgctgtgacagccccgtgatgccttttttttttttttaattaaaaaacttctcctggctgcatatcatcaagaaaaacaacattgttttcatatcctgtttcttcgggctgggcagccaggaccaatagaa

SEQ ID NO: 51007 - DNA, 177 bp, Mus musculus
  source 1..177: mol_type = other DNA
ctggaaacaagtttaccccttttccaccccaggttcttctaagctgagactacagtggtggcccaacgggactcctccagactttggtctgttcagattgacagctgatgtcaccacagccgtttcacctttagccaatcctggtggtttaagggctaagcttgtccttggccaaag

SEQ ID NO: 51008 - DNA, 417 bp, Mus musculus
  source 1..417: mol_type = other DNA
cttgccaagcagagcacagtgtgtttgctggaaactttgtttccaatactagtgaaccctcatgatggggcagtgagctccatctgtggggttaaaggtcacactagaacccataagttttggaataggcaatatctgtattcaactatagcaaatgcaaatagagctcccaaagttttatttatttatttatttatttatttatttatttatttatttattgtttaagtcaaccctaaacctgacccagacttgggggtctggctttgcttcatggagcagaattctgaagcaagtctgcagttaaaataaccaattaatagttaaaagttgaaggagttttaattactatttttcaaattaaaagagcgcttattcgcctcctgccctggggcggcggcggcggggagtgggggg

SEQ ID NO: 51009 - DNA, 414 bp, Mus musculus
  source 1..414: mol_type = other DNA
aaaccaggaaccctgcggtaccagagaagctggggtcttcccttcccggcaaagcttgccatttgcaatttcatatgccatctctggtctgaccaaaaaggaaaccactctttggctttctgctcggccaagtcggcgctgagactcggctcagccctagggggcgccaaccgaggcagtaggaggggcctctccagaggcaagcggctgcgccacgttgcccccagctcggagccctttctagctggacctcctgggcataacgcccgaaccgggctccaggagcaggggccagcaggcaggcgacagcgagctgcagggtcggggcccgggagcagcgtggatccgccgctgccagagcgcgctctcctcccacgccggcctcgccggccctcccccagctccagaagagcg

SEQ ID NO: 51010 - DNA, 556 bp, Mus musculus
  source 1..556: mol_type = other DNA
ggctggttcctaggcacccagtggcctcggagggggacccaggcatcggggccagtggtcgccccgtgcggttcctgcccggggtgcgcctcgagagggcttgaggcacctggagaggtggccgaggtagccccaacctgggaagttgcggctcccgggaacgtgtcacctgcttggccaggtctgggctcccctgggccctgggaagccagtatgcttttattttctccttaaagcatatgaatgaagggagacttgtactagcctgcactcaatttcaggggagcctaaaatagtagttgactcgctacttatttagaaagtaaagacatctcagtgttaagcttttattaaaatctgagtaatctcgcagaattagtcattcatttctctaaactgattgctaagcaaaaggcaaaccaaccttcaaagggttttgtccttttattttatttttttaacctaaatttatctaaatacaaactcatgctctcttatataagtgattacctgttccactaaggatacagttatccatgaaattcttgtttaaaaa

SEQ ID NO: 51011 - DNA, 335 bp, Mus musculus
  source 1..335: mol_type = other DNA
gacatcaccaggaaggggtcaaggttgtcctgatgtatggataaagaaacttaggggtgagactcacttcaatagaccagtatgtgaactgattgactggccatccaggaacagctgattggccatccaggactcctcagagggggtgactattacagtgactatgtgttatgctcagtcaatgttcgaattttctagaacattatgtagaaccaaggggtaagccacatggtgtctgccttatgtgtgcttctgggagcccaaggtaccacatgtgagtcaggcatgagacagaagctgctagagcctttgatctgagatctcactctgacttc

SEQ ID NO: 51012 - DNA, 407 bp, Mus musculus
  source 1..407: mol_type = other DNA
gtcttaaagacaccacactgagaatcttgtgtgtgtgctatagttacacacaaagtgacagggtttctctgtgtagccaaaggatgtcctggagctccctctgtagacgagtatgtatgttaagattgatctacattgtgagagatttttaaacaactttccaagagttttgatttttaaaggaccatctcacaagcaaatctagaatgagaaaacacggtctatgagttacatatggccaggttttaaaaagggtgtggagcgggcgctgcgtgccccggttaacaggatgacggaagcgcgccgcgggacatttctcgcggcggaccggaagctcttaggttctcccccctccccccacggaaggcgtatcctcgctcggaggcggggtggggggggcgtgactg

SEQ ID NO: 51013 - DNA, 475 bp, Mus musculus
  source 1..475: mol_type = other DNA
actatgtcctaagcctaagcgcgacaggagctcgcttccatgtttagtgcacactggacgtgcgggccctctgagttcccgtcaagtcatcgcggactcccagattccgtcacccgtaccgggcatctttaacccatcgcggggcgcgggacgcggggcggcgggaggcgcagcctccagcctcagggtcttcaggcccagcccaggtgacgtaccgcctccgccgccgcacaaaggccggcggccgcctcaccgcgcgcaggaatccggccacgcgcgccccagcccccccaccccccgccccgcggacgcagccccggctggctcgccgcccccttttgcgcttcacgcccccgacgcacaggacgccgaggcgaggcccgcctcccagccaaggagccacatccgcgtcgtgccacgccgccggctccccgcggggggactacttcgctccccgcccctcggtcccgcgcga

SEQ ID NO: 51014 - DNA, 506 bp, Mus musculus
  source 1..506: mol_type = other DNA
cagcagtggtttgtgtaaaaatcttaaacggtgaattccctgtcctaaatacaagttttatggtaggcaaagacatatatgataattcttacaattggtaatacggctgcgggtgggactcttgtacccagcccgcgtaggacagcctgagtctgcgcgaccggcccgcgcgcgcctgcgcactgctggctgcgcctgtgccctcccgggcgaacccgaggggtccgcgggtggactccgcgggcgggcgcctggggtccggagcgatgctgaggccacgtgacacgcggcaactacctagcggggtcgggcgactccggcccgcccctcggccggggtcgcgcccgcaggggtggggggccagggggcggggcgatgcggcggagtgacagctcgccgtgcctattcgggagcaagggctggggcgctggcgcgcgcggtgggcctagacagccaatggaggctgggggcggcccggctggcggggaggcgcggggggagagggg

SEQ ID NO: 51015 - DNA, 570 bp, Mus musculus
  source 1..570: mol_type = other DNA
tggcagaaaagacagcctgaatactcatcattgcctaaatttagataattttattaaaagctcactgtaaacttttccacatgcttggcaagtgatgaataaacttatgttttaaaatgtagtcgaaccattttacatgcgacaacggtttaggaaacagtttcagttaccatctatgataaagtaactttctattcatgcagaggcttatcctaaaataaatttatttaagaataagagcacccgactgctcttccgaagactgagatctgactcgtgtacttacaataaataaataaatctttaaaaaaaattcatatacataaaaaagaatatagttaactcagtaagaacgtaaatagttttcggttactacaagcaatcacagtttgccaaaacctgtttagcctggctatcacccggctacggacccacgtgcgtgcaccgcggcccgacgtgtagccctagccgtggcgcgccggcgcaggcgcagttgacgacgccgtctccctggtgcggaacaggactgcagtgcgcaggcgcagttgacgacgctgctcccaggcgctg

SEQ ID NO: 51016 - DNA, 431 bp, Mus musculus
  source 1..431: mol_type = other DNA
agatcctaaaatctgattagcttagtagattacatacactgtatgggcccgtgattgatataacatttacaggaccgtacaagtagcttgatttgtgacttatttgttctgcgactattaaaactttacaaaacgtttaccacgttggaacatgatattaaatctgtgtttgtttgttttgcatgacactaataaagctattatagcttcttacccttcttagcaacaaagaatttacaattaaaaatgccagttttaacaatcaaactcaaaaataacagctataattcgaaatactgtacaccaaacacagtttttgtgctcgcatttagtttttgcaagaaccttcctggcactgcggcaaaaagcagggttgcgatctagacctcccaggcgcccttggcccaagtacgcatgcgcgcaactggtgc

SEQ ID NO: 51017 - DNA, 284 bp, Mus musculus
  source 1..284: mol_type = other DNA
gtatatgtgtgcacacatatgtgtgtagggatgaaactctgattttttttaaatgcagttcaaatcacctgtataaataagatgctttagagcttgttataaacatccccatctcccaaagcctttaaaatagggagatgtgaagttttacagcacccaacagctggtagttcgttgggtttttaaataaccctctagaaaactttaaatcaggaagtcagtggtctgtccaaggcctggtgaatccagccctggactgcttttatcagccccaaacggagggg

SEQ ID NO: 51018 - DNA, 355 bp, Mus musculus
  source 1..355: mol_type = other DNA
agggatgaaactctgattttttttaaatgcagttcaaatcacctgtataaataagatgctttagagcttgttataaacatccccatctcccaaagcctttaaaatagggagatgtgaagttttacagcacccaacagctggtagttcgttgggtttttaaataaccctctagaaaactttaaatcaggaagtcagtggtctgtccaaggcctggtgaatccagccctggactgcttttatcagccccaaacggagggggaagcccgggatgcctccccgttgctcggctgggagcagaggcttggatcaccgccagccctgacctggcgcgtcactgcgggattacgacttccct

SEQ ID NO: 51019 - DNA, 486 bp, Mus musculus
  source 1..486: mol_type = other DNA
cgcatttttgtaaaaacaataagcgaccttcgcttgctctgaggaccactgaattacagcagtattcaactggtaaaaaactgtgcagtcttgcacatatgggcgcataaatatatggacatgtttcaggccactgcaacacgggaaaatgaattgtacccttggtgtgggaaatgcaggaccctgcggtttggcctgcaccgccgtaaattcaaaccctgggagggctagagcgcacagcccgcagcggccctagaggagctgaggatctgcgcaaatgctggtgccagggaagatgctctggccagcgcactcgggaggcgggaccttggcagccggttcctgctgcttctccataacgcagcagctcgctgctctgtggtccagggacccaggctctgcggccgctgctgcgctgcgggactcaagtgcacctcctcccgccgccgcggcgcgctccccacttgcaaatgccagtccagcttg

SEQ ID NO: 51020 - DNA, 491 bp, Mus musculus
  source 1..491: mol_type = other DNA
aagaacataataaagttactgtttatggtgtttataactgtaagcacatatttttataaaatacaaagtgtgatcatttttataactacaaagaaatggactccttctcttaaacactgtgtttattaactctttgggactaagagttttcagtagcgaaaaatctatgcaataaaaggaaattcattagacggaaggcctcaatggctgtctacacactgatagctgctcagtccagaggctagctgctcagcagttctaactgggcctgaagccctgcaggaatcctggggggttgctgatctttcgaaactgcagtctgctctcagagctgagctgcctgatgctcagaccgtccccgtctggagcagggatcttccagagccagcccctgctcactgagctctggatcgatccctacccatccttgacatgttggggaattctcccatctgcagagggctgaggtaactgaggctccatgagtagag

SEQ ID NO: 51021 - DNA, 392 bp, Mus musculus
  source 1..392: mol_type = other DNA
tggtgcccccaaagggggccgggaacagctgggagcccttcccattgctcttcaatgagaaacagagtctgtcaattatagacatgtaagatacagtcccagagggtgtgagtcctgcacctcccagtccatcggcaggggcagtcctgtgaccatcagtgtgcctgtgactgttatgtttctctctcctttaaattaaaaaaataaaaataaataaaacccaaagcaacaggtttccttgtggcatttcaaagcagggaaatttgtccttctgactgatcagccatgatcatggatgaccaagcagagacctgccacgcagttccactgtgctccgtctgcaggcgttcagacagaaggttggcgggaggcatgatgccacccagcagctc

SEQ ID NO: 51022 - DNA, 348 bp, Mus musculus
  source 1..348: mol_type = other DNA
gccagggaaaccagattcagtttcccttgaaagacgggttccatggtggctttcctgcgacactgaaaagtcctaagttaataatccaaaagttttcattgataaccatgcgggctggactgtaaagcccagctcgtcctgttggcttgcaggagagggaaccggttccaccaggccttgggcctctgctagaggcaggtggatggccaggccaagtttggcacagtctttggggctgactgagccggtcagactctgggcggaggaagagtggaggctccgcctctgtttcttagcctgagaccgcagctaggggcgcttacaccttggcaaggaacttcctgttcc

SEQ ID NO: 51023 - DNA, 369 bp, Mus musculus
  source 1..369: mol_type = other DNA
gagctggaggcgcagcctgagtgggcggcagcacgtgaccacctacagctgcagagcaatggcagccagtgcggcgtcagggctcagctgacccttcctaacacagggcctggccatcttgtgcccagccctggtaggcagaagatgcctgatagtctgcgaaaccaatgttagactttaaatcgcacattctgactctgtgggtcattattttgtaaagtgccagatacggaggcctttgttgaaatagtatcattacttcaagatcttcaatcctagtatgtattaaagataattacggactggcacccttccggagtgtgtggggacgcgtctctgagcctctgagcctctgagccctgggtcccg

SEQ ID NO: 51024 - DNA, 343 bp, Mus musculus
  source 1..343: mol_type = other DNA
ttctatttctcagcataacactgaattgaatttctaaagaaaccatgcttggttcagcagcctggtgtctgtcccgccagttcccaggtcaggcagcccagggaaaggaggaggacagacactgacttccctgagctgggggatgttctctgcagagcagggctctcctctggagagaagggcaaggtgcagcaggccccagaaggtgctcgggacccagaagggctggcagggctcctcagtgagtgtagctggaagaatggtcaggctgaaggctcagcacagagctggagcaggcagccatctgctgagccaaggggtggagccagcactatttaaagag

SEQ ID NO: 51025 - DNA, 485 bp, Mus musculus
  source 1..485: mol_type = other DNA
aagccctctgaatgcattttaaacaagtattaattagataattaattcactatcttggtggactgactgaatccctgggagattgagctcagctcctagcggaattgccaggcccaaatctacctcctcaagctgtggtcagccagaccctgttggagtgcgcttggcaagcggagaggtgcactctttcgctctgagccttaagtcctaagggcacttctgcctctgcagggacagtggacccccgggggttccttgagcggctgcccctttaagggttcccgaaactttccagcagctctaagcgtggcctcccgggcacgttccggggaaattttgcactccagtttcccggggaagaggcgcgacccgcgcccatccttgaccttggccacggaggaggggcagggcctgcggggaggcggccgccagagggggcagcgactgagaacttgttctgtccgccccgccccggccggctaagg

SEQ ID NO: 51026 - DNA, 232 bp, Mus musculus
  source 1..232: mol_type = other DNA
gcttgccttagttacttaagaccactgtgactctaatgagctaaaaagtagatacgtccttgtatatacatatcccaagggacctggagggtcacatgtcagcaagggggcagtgtgacgactttggacacaagaatacatgttaggggcgccttaaagacaggcctcctgcttcttaggtgaccctggagctccagggtgctaccagctgtgcctgttagcctgccagtct

SEQ ID NO: 51027 - DNA, 373 bp, Mus musculus
  source 1..373: mol_type = other DNA
catcataatgatttctagggccaaagaacattgtatgccaggaaccatgctcggcacggaccaggtgctagccaccaaatctgccctcacccttggggctgaggtcaagaccctgtgacatggtctactctaagaggaccctggttcccagggcaggcagcccagaagggctctgaggacagacactgacttccctgagctgggggatgttctctgcagagcagggctctcctctggagagaagggcaaggtgcagctagcagtgccagaagggctggcaggactcctcagtgattcctggtacccttcctagtgcagctggaagaattgcaggctgccccttaggggcggagccagcactatttaaagaggt

SEQ ID NO: 51028 - DNA, 370 bp, Mus musculus
  source 1..370: mol_type = other DNA
atgataaagagaaaaagtgatttacttcttcgtacaaagaggactttttgcagctgccccatcggtgctcgctggcagagagagcgctgcttggtctggtctcttagagccttatttaggccgagcagaagaccaggtctgctgtagactgcagtttttaggaaagcctgtgtccacagctcagacagagcctgtcggagttgggaatgtagccttggggccaaagacccgtcgcagcaggaccctggagttcccatgggtctgggcctcaagggtccgctggcaggggaggagcgctccctgggcttccctcggggaaactgtgcctgcgtttaggggtgtcaccctggctcccgggacgccgcctccg

SEQ ID NO: 51029 - DNA, 211 bp, Mus musculus
  source 1..211: mol_type = other DNA
taaacagcctgattttatttatacttagtcctgtttcatatgtagaagatgaaagaaagcaataccaatggctgtcctggaactcactttgtagaccagactgggtgttaaaggcgtgtgccagggcaatgtccttcagctccaggtgcaaacacccggagccctgggcccgcccgtcggcctgcgctgcgcaatgccgcgccaccgcccc

SEQ ID NO: 51030 - DNA, 342 bp, Mus musculus
  source 1..342: mol_type = other DNA
agaacaggttcatctgtttacctttaaaaggtcactgttttccataatgaagggatatttgtttgtttgtttaaaacaagacctccctctgaagcctaggctgatctcaaacttgaggtgatgcccaattttaaagaaccagttacctggttggatactatataactctaatataaacaaatgttctgtttctccactggcatcgggtacatgaactgacccagatctcagttggaaactaaaggagcgcagggattccaccgatccctggtgggaccgcaacacccggcgctagactctcaccggcagccgctcccttgagggcgtcgggggtgggcccag

SEQ ID NO: 51031 - DNA, 424 bp, Mus musculus
  source 1..424: mol_type = other DNA
catagaacacctaatttaagatctaggcttttgttttgtttagtctgttacagaaatttcaccaggctctagaaaacttccgtggcctagagatctgacaaatggcattgtaattttctggatgatgggatccttgcacaccacccttcccagcttcaacaccattttaaaagggtaaggtttggatacttgttcactgccgctttctccaggaggaagaaatggagatgagcaggggctttccgcgaccacatgcgtaccctgggggcgtccctacgctctgctgctcgtgcccgcgcctcaccggagaggcaccaacgcgccggacccaacgcggccgcgctcccgcaggcccgccctcggcccgcccccagccgcccggcagcgccacgcacgtgacgagcgctgcttgcgatgacctcat

SEQ ID NO: 51032 - DNA, 373 bp, Mus musculus
  source 1..373: mol_type = other DNA
tacgtacatacacacaggcaactcaaatatattatcttagttttctgttgctgtaataaaacaccataaccaaaaacgcttgccaaggcttgctcagcctgctttcttatagaacctaggacctgctcaggggtagcactgcccacagtgaactgtgtgactgtaggctaaggtttgggtcaagataacaaaaatcatatgtacatagcacactgcatgcacatattatatgcatgcaccttgtacaagtacacacatatagtgtgcacacacacacagcacatgtatacacagtatgcacatacatataacaacatccatataagatgtgattaaggctcatgtgatgcttttgttctcatagaattccaca

SEQ ID NO: 51033 - DNA, 463 bp, Mus musculus
  source 1..463: mol_type = other DNA
tagggagtttttaatcccatatcctagctaggagaggttcaagttcaatcctagcaaccttgaactgattcgtcttttgctccaacatactaggagaaggctgaatgttaggtccacctagcctaacttgaagtccagttccactgatgcagctgcagaaaacacagctgaaccatgtttctgacaactttctgaaacttctcaagatgagcaatgcacatcctgaactatggcctaggaccatcagcctactttagggtgacagctacaggctgctgtggctagccttgcaaaatcctagtcttggcagtggggaaattcttggaattcccagcaaggcgcaccactcaaggtagtggcaggagaggacttgcgcccttaacgccgccgtgagggccctcggggcctttaaggaggcggagcagactccgctcctgctccgcccccaggcccggcctcctgc

SEQ ID NO: 51034 - DNA, 264 bp, Mus musculus
  source 1..264: mol_type = other DNA
cgccaggcttgaacattcatcttgacaggccttatcaagctggatagagacatgtgtttttccctttataaacgtaaagcctattattaaactttgagtcttgatcatctcccgcggctgctggatggctccacccagccagctttggcagatcagaagctggtcccgggtctgaatcccaacgcaagctaactaccttgattccaggaggaaaatccctgtagaatcagagcctccaggcagacctgcgtgtcagaagagaag

SEQ ID NO: 51035 - DNA, 647 bp, Mus musculus
  source 1..647: mol_type = other DNA
ttcgaggccagcctgggctacgagactttttttattttatataaaaatcacgcccgcccgcctctgcagatgcggatctctccgcggggctctggggaccccgggtggcccggcgagtggacatcttcttccctgggggtcgcagccccccacccgtgggacccgcacacacagcgggcagacagctcagggccgtctgtgaggggagccgagggcgccctctgctggcctgtgggtgtcatggcggcggcagtacgcgccctgacttttcccgggaccccacggttgggcggggacggcgtcagctgagacgcgggagaccatagtggggtctcacctgagtgacatgcccgctttatgactatttttatagattataatacgtgacaccatgatgggcggggcctgcggcggctgcagtcttctgcccgcagcgcccctccggatgaggcccccgcccaccgcgcagcgtggaggggaaaaaaaagcctcagacgctgcctctgtcagttacgggcggaggtggtaggggcctcccattggaagcctctgccagtcacggctgggcaggcgggacttctggcactgtttcctgctcctggaaacagggagtggagaagcttctcgattggaagccgctgccgtca

SEQ ID NO: 51036 - DNA, 555 bp, Mus musculus
  source 1..555: mol_type = other DNA
gaaaaaaatggaagagtcccattgtaatttttaccttctgaagccgacttaaaagactatttcataagcctcttgacttagctcttaggaaatttccttttgcatgaatttgggaagagcgaaacgttcagtgggaacaatcgttcccccgccggttccgggttccttcccgcctccggggtgcccaggcccggctcgcgcagctcgcatttcccgcacggcggctgcacgcgacccgagccacctcgtgtgtgcagcgtctgtcccccgccgccaggacgccggggcacaatggtggcgatgagtccggaagcggcaacgaagacaccgtagtttcctccatcgggatcggccacccgaagcccctccgtccagccgcagcgctcgctcccgcggcccgggatgaggacagccaagggcctcgggtcccccgctcccgccgcagcgactccagacgctctggcccacgccatctctatggtctggcgcggccgcggacctcgcgcggcctggtcgccagggggcgcgctggctggcgccgccgactccgagtgc

SEQ ID NO: 51037 - DNA, 257 bp, Mus musculus
  source 1..257: mol_type = other DNA
cccccaagatcaatcctgttgaacgttggtccagccagctggaattgagagcggcggtcttgggaggtcccatattctacagccccaagttggattttgatggaatcctacttcgttttgtctgtggtgccataaaaagtaggtagactgaaaattgtctcggatgaggagtcttcaggtcacaggagagaatggtggtcccagcatgcggagcacactcccctcacgtgctctgggtggcgcgcagaaggaaggtg

SEQ ID NO: 51038 - DNA, 385 bp, Mus musculus
  source 1..385: mol_type = other DNA
tttaagcatgacaacagaaatgtaatttgattctattcatcataaaacaacaattctggtatgcaggtatacatacaggcagaacactgtatccatagtaaataaaaaaatctttttaaaaaatgacttgaaaaaaatcttgtatatttttaacatctttcatcaatggttacagactgttgtatagccttaatttacagtaatgtaatacatactctggataaaatgggcaaaccatggtttataaatgacgccagggcagccctggtgagtagggcaacaagagcgtatgggcagcccctggtggcaggctgtcccgggtaatcactccaggcagccaaaaaccgctttttagcgttccatcaatttttagctctcaacggct

SEQ ID NO: 51039 - DNA, 588 bp, Mus musculus
  source 1..588: mol_type = other DNA
ttccgggttccttcccgcctccggggtgcccaggcccggctcgcgcagctcgcatttcccgcacggcggctgcacgcgacccgagccacctcgtgtgtgcagcgtctgtcccccgccgccaggacgccggggcacaatggtggcgatgagtccggaagcggcaacgaagacaccgtagtttcctccatcgggatcggccacccgaagcccctccgtccagccgcagcgctcgctcccgcggcccgggatgaggacagccaagggcctcgggtcccccgctcccgccgcagcgactccagacgctctggcccacgccatctctatggtctggcgcggccgcggacctcgcgcggcctggtcgccagggggcgcgctggctggcgccgccgactccgagtgcgcggctcgaccgcgtccgccatattggatgccgcagccgccgcggtcagcgcttcctcctgtgtcttcgctgcgcgctgcaggttcccgcggcctaggcggcagtccgagcgaggcggagaagcagagaaggcgccgcgccagcccctcccccgccgccgacccgccccggcggcctccgtcctgctc

SEQ ID NO: 51040 - DNA, 438 bp, Mus musculus
  source 1..438: mol_type = other DNA
gatattatctctatacatatgctatgaagttttttaggctagccttgaactcactgtgtagctatgtcacacttgagcctaagagttatgtgagctgtgttcccagattggccattaactatcaggccaatatgtcatttgagactgtttctgtcagattttgaaggggatttttttcataataccaattctgcccagccctatgggtgcaaccatttggtaatttaacttaaacttcaaactttattaggttacacagacaactttttggttccttttacttttaatttgtgtttgaaagaatctatttcatagaatttgaattaaattttcactagttgccaaataattcgaaatacggcttgtcctggactgctaactattactctgtctgagcagccataggctgatggcttgaagtcggtcagacaatgcagc

SEQ ID NO: 51041 - DNA, 424 bp, Mus musculus
  source 1..424: mol_type = other DNA
tttgccttttaaaagccagcttcagggaattagagttgtaattctgaacacttgccaggatcttacatttttgtaagctagtacttaagcctcacacatggtatgtgctgaataaagatttaattcaaaccttttttcagttacctttgctaatatttataaattatttggaggagatttaaaactatttaatgtggtttacaatgctaacaaaattctccatcagagtttacagctgcaatctgaagtgtctaacctgagtatgtctacttggcagacattttcagcgcacttagtcttcgcactgcttgtctcctctcccactctgtgcatgtctgtgcatgcaggcagcaaggatgctagtcagtgtgccctggctctgtgggtctcagctgcacagaaatagctatcttctaggagaaca

SEQ ID NO: 51042 - DNA, 267 bp, Mus musculus
  source 1..267: mol_type = other DNA
ttttagaaaaagcttcactacagctggaatctgtgaacttccagcgatatttaaagacccagaatggctttcatttggacattgttcaattcttcagccatttgctctaaagtctaagtcttaaactcggttttcagcaggcttaccttaaataagcctatagttctctatggaactaagttctgaaagaatcaagcctttggaatgtcaaaggcctgcggagcctcccagaggttacaaagggcctcagaggcgggcagtcaaggc

SEQ ID NO: 51043 - DNA, 257 bp, Mus musculus
  source 1..257: mol_type = other DNA
ttgctgcaagaatgcatttctggggctggggccattgcatctgcagcaccagtctcccacgagtagactgttgagtgcaatcagccactgccctcagggaactggcgcttaggggacccatgtcagagccactgtgtgtgtgtgtgtgtgagagagagagagagagagtgtgctgtattattcacacagtccctttgatgaggttagttgatgtgggaagtcccaccctaaatgtgggtggtacctcctgggagcga

SEQ ID NO: 51044 - DNA, 702 bp, Mus musculus
  source 1..702: mol_type = other DNA
ggaggcacgaggggaccgagcagcttcgggccccgagcgccggcagccggttcccccccccctcccctcgctcccccgggccgggccctccgcgccaggccgggcgagaccagccgggtgagcggggcgagctggcgggcgaacgtgcgctcagcggcggcgcccggggccgagtccagtccgcgtccctcggagagaagcggctcggctccctcacgccgcgctgggcccgattaggctcaggcaagtcgcatttcccccccccccccatatccgggttagagaggggggaaaatttccgcccgttcaggccgtagcgggcgcgagcccccgagcgcaaaggcgcgcccccggcgggcggcccggggctgcggggggtggggtggggagggcaccgcgcttccccgcgggccgcgtggatgcgcgcaggaggggcggccggctgcgagtggggacattgtctccccccaccccgcccggccgcgccacgccgcggcgatcatggccgcgcgggcagcagcggcggcgcgggcgcgggcgggcagcggcgagcggcgggcgccctcggggccgcggccggcgcccggggcccgggacctggagacgggcgcgcgcggcgcggtggcggctccgggccccatcctggggggcggcgacggcggcctgaataatgatggcccatagcgcgagcgccgcggcggc

SEQ ID NO: 51045 - DNA, 357 bp, Mus musculus
  source 1..357: mol_type = other DNA
aactttatttcactatttcagtaagaatctaatgtaaccatcggctaaatgttaaaatgtcatttcaaagataccttcattttatagaggttaagggccatctttttccataagaaattggtatgtatatatatatttgtttgtggactatgtgcccacagaggctatccagtgtccaatcccaggctttcctttggcctgagaaagaaggggcgtgctcttccggtgtagacctttatatagcaatagtaaagaatatgggtttgtaaaacaaactacagtatgtgtgcgctaagcccatgcagcacagttagggaactgcgcagccgcagtgggagggagggccgcgtctgtact

SEQ ID NO: 51046 - DNA, 362 bp, Mus musculus
  source 1..362: mol_type = other DNA
attttaaaagatgatgccatatgtcttaggtctccctttgagaggctgaaacatcgtcctcccaggcctgcttgcaggctgctaaggatcccagcaagtccggggcagccttggagcccgtgtagagagggcctcattggctcagttcattcaatcatttagccagcccagcgcgtccactgggggcgggcctgaaataactatttcgaaatttctcagaaagaagtggagtgatcctcccaggagggccgtcttgtggggcgccgccctcggctctgggctgggacagagagcagcctttctgtcttctctcactgcaagagtgttaaggttgcacagggaaggcagccgcggaacctttc

SEQ ID NO: 51047 - DNA, 505 bp, Mus musculus
  source 1..505: mol_type = other DNA
cgcttctaccgggccccgaagcccaggggcgcagcagcgcttaggctgctggggctctctggcgctttgtatacccaactgtcaaactgtgcaaacaaagcctgccactgggggtttttaatccaaggcagatcggtcgctgctggagctgacacagaccgctctggcgtctcagccacgcgtggcgctggggagggtcacttctttgcgtggcgggtactcaggtcccccgtagtagcaagaacggtttttcgactggtcatgagaaccgcgggagctagggtgaaggatgtcacccgggagccaggagccttcctccgggcgcgccaggcccgcacagtccccgagccttgcgctctggcccggggatactggggcagggacccaagggagcgggtgcccaggcttcactgaggagcccggctgtgaggcgcgggcgtcaccgcccacccggcggcgaggaggcggacctgctcggagcgccgcgcgcgccggggctgagcct

SEQ ID NO: 51048 - DNA, 311 bp, Mus musculus
  source 1..311: mol_type = other DNA
agcctctgaactaagttttataaaggccaatttaggccaggcatggtgatgtatgcctttaatcccagcattcaggccagcctgatagcattggagttctgaaactgacaggtccctgtggcaaaagatcagaaatgtggcttccgaaccttcctcccagcagtgtggagggaggagatccagggagattctggcctgtgtcaccaggcagagggtgacatcatttaccctcagtgagcttcagtggctgcagcttattagtgctgtgctatcaccaattaggtgttgagcactcaggggctgcagcagcc

SEQ ID NO: 51049 - DNA, 416 bp, Mus musculus
  source 1..416: mol_type = other DNA
cctgtcactctgatagccacgcagtgaattaaagagtgtgtcaggcacacacacacacacctgagcacagaacccaatggccccatccggggtctcaggcgtggggcaggggtggggtggggggttgccagccctgctcagccctcagcccccagcgggaatccgggcagggtccgggctcctgaggctctccgcggctgcagcctcctccgcggcgaggaatgtgtgcccagcagggaggaccgtcccggagtactgagccctggcgagctcaagcccaccgggcgcagtctgggttcccgctgtggctcgcaggtgcctgcctcgccgcttgggggagcgcggtcgtcgtcggagaggctgggcggcagcgccacctcacctgctcggggcagtgcggcggggcccgggcggag

SEQ ID NO: 51050 - DNA, 673 bp, Mus musculus
  source 1..673: mol_type = other DNA
ttgcaaattctctggtcagtaaaaaaaaacatttttttttccccagtgctggggtgcaaacacctatcaaatttgacagtaaaattaaatatcaacttcctgggataagagagtcgattttatttgtctagaagatgcatccttattataaacaactgcattaaactattgcactgattaaggtaaatcgtttattaatacttcttgaggcatttttaaacaatccaaaccccaaggtatgcagcctagatgcaggaagccattgctcgccctgggctggcttgtccgtgtggcgctcgcagctcagcaagccccgccgtgggcccgggatcccaggcgggtggctcccgtcagttcccggggatcaccgttctccggctcgcagagagccgggcctgaggcacagcccccctcggcgccgcgcccagcgaacggctcggcggcggcggcgaccaggccgcgaccccgacgcccgtccgaccccgcagccgccgctccagccagggccctgcgctcggagccgcgggcggcggggtcggggcggaggccggggcgggcgaggaggccgggctgcggccgaggccccaggcgcgcttccgccgcgcacgccgcggtccatgggaggcttggccggcgggggcgggggccgcgcagccgggactttcaggaactg

SEQ ID NO: 51051 - DNA, 380 bp, Mus musculus
  source 1..380: mol_type = other DNA
tttcctctggagacaaaagctagaattacagttgacaacggcgttcccgtggtccagagaacctcggaaaggactctcagtggcgcctgtggtggccctgccaggccagggtagggttgcacagaatttaagtatcatttagtcttacaagaggtctgtatattataaaagctattgtgtatatattcagacaagttcaagtccaaccttgacttgagctgcattcctttaccaaagctccttagttattgagcagcatttgcttctggttgagaattcctgcgcacaccatgtctctgtctagccaccagcccagctaggtaggtcaccgaagtccaccggctgccctccaggctggtgtcgggtcacaggcaccagat

SEQ ID NO: 51052 - DNA, 387 bp, Mus musculus
  source 1..387: mol_type = other DNA
tggagagctatggctctaggaggccagtgcctggcagccagcctgggaaccagaggttattttttaaagatttatttattgattatatgtaagtacactgtagctgtcttcagacactccagagagcagtcgggtgttcttacccacccacaatagactttcttgaaggtggcagaatgtgtcctcctagttctttggagttctcagagcctcacatgtagctgaggagggcaggcagcctgtctcctcctcttggtgagcaggccaaggaagtcacttctgtgaggaggatcctgacccatccacagcactgtgctggctcccagactgggcctcggtcaatgtccagatgtagctggttacccgggtaacagggacagcctgcca

SEQ ID NO: 51053 - DNA, 495 bp, Mus musculus
  source 1..495: mol_type = other DNA
ttacatctgagatgaaacaaaaaactaaacagcattaaactaaagcagaatatttgcaatattaataaagcataaatcctacttacaaattctaattaatcttttaaaaagtaagctttggacagcctagactacagtgtaaaatagattcattattcaactgttttcttttttatccaagagaaactgatgagaaagcaggtaatttaaatttacaaacacctaggtctccagatcttgtgttcttttgattaataaactacgtcctctaacgtgacagccaccagtgtctacacgcaggcaatgcgtgatggccgcgcggacccagggtgcgggacttcggcccgcccacaggaccgaaggcttttctaggcgcgcagaggcagcagcgttcagctggcccggcgtcgccgactcactgcgcctgcgccgtacgtcatcgcgcctgcgacaccctagtaggtggggcgactctctggggcgggccctaagggc

SEQ ID NO: 51054 - DNA, 476 bp, Mus musculus
  source 1..476: mol_type = other DNA
acgtacatacatacatgcatacatatatgtaataaatacattctttaaaagagaagtatatcagcatgagcttaaatgtgaaatacaatttaacctaaggtcctgtctcaactgctgagaactcagctccattaacttcagaactttccggaggccttcagcttaaaatgacggttactgggattagaaaagtcggagaagagcaagatgtgtccgactcaggtgtggcttatgagaacacagagcccaggacagtgcaccttccatgcaggtgctctcctgtggtgccgcggcgagtcatcgggtccctccgagaccgcgcgacgcggcgacgtcctacctgccggcgcaatgactctggcagcccggacggctcgcggtggactccgccggctacagagctccctctgagggcttgaccccgcccttagggcccgccccagagagtcgccccacctactagggtgtcgcaggcg

SEQ ID NO: 51055 - DNA, 361 bp, Mus musculus
  source 1..361: mol_type = other DNA
ttttctaaatagaaggcaactctcttcattccataatgagaaaggtttttaaagtataaaatgcagattcataactgacttaacagattgttataagagaacattaccaagaacaccgtgttgttcaatttgttagcactcttaagttgtagaacggactcttactcagacttctgatagaattacaagagggattttaaaaaaacgtaaaatggtttcaacgtttgccaatgataagaaatagaaaacagtgcctaacagttgggaagagtgtctactgttcttagccttgcctcaaggaaagatgcgatcttgtggaaaagaggggtactgacgtgacaacagcagcaccgcctgaatg

SEQ ID NO: 51056 - DNA, 288 bp, Mus musculus
  source 1..288: mol_type = other DNA
cacacccacagtgtgtggcattgtcattttaaagtaaattccctttttatttttaaaaaatccagtggcatgcatcatacagagtggatttatcagtaaatattaagaatcagacataacctctattttaactaaattaggtttcatacaattcaaaacatgatgccttaatgatttagaatctgattcatttttatccacttaggtgatgcagaaatccttagatcttgctcagcttctgcattattctgtaccctacgtttagaatagagcagagtgaataagctg

SEQ ID NO: 51057 - DNA, 494 bp, Mus musculus
  source 1..494: mol_type = other DNA
gttgtagaacggactcttactcagacttctgatagaattacaagagggattttaaaaaaacgtaaaatggtttcaacgtttgccaatgataagaaatagaaaacagtgcctaacagttgggaagagtgtctactgttcttagccttgcctcaaggaaagatgcgatcttgtggaaaagaggggtactgacgtgacaacagcagcaccgcctgaatgactgagacggttgacaagctcgcctgtcactcccaggctaggctaggcgccctggagtctccggcgtcgagcggcgggtggggggctcgagaccgcaccccgcgcccgcgcccgagcccgcgcccgagcccgcgcccgagcccgcgccccagcccgcgcgagcccggggcagcaccacccgccgcgggtccgctcgcggagggcgggccggggaggcgccgggtcacgtggcgcggtcacgtgcccacccccccaccccccaccccgactgacagtcc

SEQ ID NO: 51058 - DNA, 331 bp, Mus musculus
  source 1..331: mol_type = other DNA
ctactagctgtcattgtcacaaagatgttaatagtagccgccattcttattcatggagaggagtggctggctttccatggaccatgttcaggctgaccctggaaggttcttgtcatgtgcagctgtaaagtgctcatcaccacagaagcagagcactcctctgctccactgtagatgaatgtttggctgttccatcttgggaacattatacagtactgatatcagtacaggcctgctctagcttatacgcagcctttgcagaggctgccaattgtctgcagtggaaagcacatcccctcaggactggcgccggggcggagtgggcgtggcc

SEQ ID NO: 51059 - DNA, 333 bp, Mus musculus
  source 1..333: mol_type = other DNA
cgcggtcactgagggtggtgctgctctctgccagctccaaactcggagccctgctggggctcccagtgtgggctgactggggctctgtgctgcaaagagtgaatgaggtgtcattctattgctgaccactggtgtccagtgaattcccacctcatagaagggagctgcccttttgaaagcttgcagagatacgattctgcaaatgcaagcttttgaagtctgtgcccacactgctgatggcaccgttccgctgtcagctgctctgcacctggtctccagctgcacccgccctggacccttgaccaccagtctgacctagaactcagaaatctg

SEQ ID NO: 51060 - DNA, 393 bp, Mus musculus
  source 1..393: mol_type = other DNA
tcattattaaaaagcaaaaaatttaaacttcattgctattcagcaaaagagtctatgtccgagtatatcatttaaaaatatatctttgggttacaaaggaaattggagactctcatctgaagctccctgttgacttggccacaggatcatcaggtggatgattagccaggcactagcctgtcactttgtagaccaggctggcctcgcatcccaagtgctgggtgccaccacgcccggtgagagctcccaatagctgatccgcaaggagaagcaatggaaatcattctacaatttgttcctagtcaagatttgtttgaaaggggagggagggccaggacctctttcttcccctctttggaaagtcccccgcgcgggggcggagtgggcgtggcc

SEQ ID NO: 51061 - DNA, 421 bp, Mus musculus
  source 1..421: mol_type = other DNA
tttgaaatgttaagacagttcacctggttaaagcagagccactggtcaccctggtcagaaggtgcagttctctcaaattttagaaagcaggcaggctgtcaattagtaagggcctcctgaatcattagttgtccatacattcaggagacctgagcctaagccctgcaggccagagggcagagacgtgccaatggcatggcacatgttaacgccttaacacagtagtaaactttcgagagatgctaatcttgccttgcatacttccctcttcttcggaggggaagaaaagagggtggacccaaggcctttggggtccgtggtggcctcgcatctgggttagccgggacgcctacccacgtgacaggtgtccggcgcgagtgctgcgggagactgccccgccccgcgggtccgtggcttccgt

SEQ ID NO: 51062 - DNA, 395 bp, Mus musculus
  source 1..395: mol_type = other DNA
tcattattaaaaagcaaaaaatttaaacttcattgctattcagcaaaagagtcatgtccgagtatatcatttaaaaatatatctttgggttacaaaggaaaggagactctcatctgaggcttgttgacttggccacaggatcatcaggtggatgattagccaggcactagccttcactttgtagaccaggctggcctcgagcctctgcatcccaagtgctgggataggggtgccaccacgcccggtgagagctcccaatagctgaatcattctacaatttgttcctagtcaagatttgtttgaaaggaggaccaggacctctttcttgcccagtttgctttggaaaccaaatcccgccacggccccccccgcgcgggggcggagtgggcgtgttc

SEQ ID NO: 51063 - DNA, 342 bp, Mus musculus
  source 1..342: mol_type = other DNA
cgcggtcactgagggtggtgctgctctctgccagctccaaactcggagccctgctggggctcccagtgtgggctgactggggctctgtgctgcaaagagtgaatgaggtgtcattctattgctgaccactggtgtccagtgaattcccacctcatagaagggagctgccctgcttttgaaagcttgcagagatacgattctgcaaatgcaagcttttgaagtctgtgcccacacttggcaccgttccgctgtcagctgctctgctccagctgcacccgggccctggacccttgaccagtctgacctagaactcagaaatctgcctgcccccaagtactggga

SEQ ID NO: 51064 - DNA, 373 bp, Mus musculus
  source 1..373: mol_type = other DNA
agatatttagaattatagctgagttacacctatatacaggccatgggtgtgaaagcccttgccctaggagtgaaaagttctcacaccaaaaagtctgatgttcgattacacaaactctcctgcgtgtgtgtctgtctgtcattgttccacgcagacacccagcagcggcacctgcgcaagttctccatgagggactggggcatcgagcagaagtggatgttcccagagtccccaggagtgcccgaggggagtccctgggggagtatgtcgtggtgctcttcctgggccccatgtcacagaagagacacgaagctgcaggctcagcagtcttggaactggcccttgctgcagtgcaggagattctcgggctgca

SEQ ID NO: 51065 - DNA, 408 bp, Mus musculus
  source 1..408: mol_type = other DNA
acgtggacctcctcctttcagaaatgtgcagaaatcatcgtggcccaccttggcctgaattacacacagtacagggttactgtggggtttgagcacctgaaccagcccatcttcacggtgagtgtgccgtgcagcagtttatctcggaaaaccagaagccagggtgcgctcagccagccagccatcccacgcttagctagctgcctgtgatttcacatactttacttattttaggagagagaaaggttgacttttgatagaaaattaataattcagatgataatttatctgctagattcaccacttaaaaccatttcaataaatgttgatacttaagattttggatctgttcttcagtatagaagtaaaatttgttacaacatgtgaaacagcacacagacactgtct

SEQ ID NO: 51066 - DNA, 399 bp, Mus musculus
  source 1..399: mol_type = other DNA
tcattattaaaaagcaaaaaatttaaacttcattgctattcagcaaaagagtcatgtccgagtatatcatttaaaaatatatctttgggttacaaaggaaaggagactctcatctgaggctccctgttgacttggccacaggatcatcaggtggatgattagccaggcactagccttcactttgtagaccaggctggcctcgagcctctgcatcccaagtgctgggatgcacgcccggtgagagctcccaactttggttcagatagctgatccggaaggaagtcattctacaatttgttcctagtcaagatttgtttgaaagggagggagggccaggacctctttcttcccctggaaacggccccccccgcgcgggggcggagtgggcgtgttctggcc

SEQ ID NO: 51067 - DNA, 224 bp, Mus musculus
  source 1..224: mol_type = other DNA
catcctagctgcctggaagccagactcctgcttgcacacagcgaagggcaagttcaggtcccaggatgctactgttaatctagcctgagagtagagaccctgtccatggcagttacttagttttcagaacatgacaaatatgcttatgatttacatactatcctgcatgcatgtcagccttcaaaaaaaatgccacctgaggtcacactcaccgaagtctcttt

SEQ ID NO: 51068 - DNA, 441 bp, Mus musculus
  source 1..441: mol_type = other DNA
tttgcttttcagaaacgtgaaaataggtaaatgctgttaaaactgtaacccgtgtaaaatgatccttcctagttttaaaatatttggtgttacgttttttagttgaaaggaaaaaaaaaaggttcatgcttagaattgtcaagacaagacatggcctctgatgtataaactgcctcagtctgttacttcatatgcaactcagatcaagtagaatttccatttaaaattgacacatatgggtataaaattttattaagtacaacttcatatttaggcatccaagcttaaattttctttaggttgcataatttgcccttacaacaaactcagtctccagaattctcaatgaagatgtcagttttgaatctttatcaatagtctttagtaagctcaacagttgatgtgttaagagttaaaagcagaaactcccgttagtgactc

SEQ ID NO: 51069 - DNA, 683 bp, Mus musculus
  source 1..683: mol_type = other DNA
aactaaggcatcccgggcaagggtcttccacgcgcatgcctgtttcagaggctgcccaggccacgtgcacggagacccggggccgtgaccagggtgagacccggcagccccacccacgaacctgcccggtggccgccgctccagcctccgctccgtgcagcgcggggcacttgcaccttccctccgcgctcgcctgctgcagcaccggactccaaggagtcctgagctagggctcgcggaaggagagaggtcctgggtcccgtccgctctgggtcccgcggagccgcggccatcttggcgggctcacctcgcgggtcgtgcgctcgggctgggacagggtggggccccgggaccccaccccgctggggatcggggggggggggacacgcaccggaggagtgctccgtgtgccgtcacgtgcgctcccgcctgtgcgcggacttgggagtccccacgcgtgggggacagtggagctgagcctccagtgcagctcgagccgctgcgtgaccctccgtcccggggtggggcacccttcccgaagccaaggccgagcgcgggctgcgcggacgcgcgccccccttccggccgatccctgaaacctgcggagcgctcgggcgcgcgcgccgcgccccgccccgatcgggcgtgactcatcttgggaccgcccggccggttcttatact

SEQ ID NO: 51070 - DNA, 503 bp, Mus musculus
  source 1..503: mol_type = other DNA
ggtagtggttaaaagcactaactgcttgggttgtgacacctgggaacaccaactcagttttgatcttgccagaaagatgctaagtgctaggactaaacctctcttataaaacaaacttaagtgttctataggcacggcctgcgatgtggcatgacgtcacagtgagatgtgcaggggcccaaggcctctgtcccttcacgctctggagctcgagcctcctagaaaggcctggaacagcgagcgggccgggccgctcccagggtggagaagggctcgtccttccggcacccgggcggggcacgatcccaccggaagtgcggctccatccgcgctacaaggcggcctggatgacgcaaggctgcggcggcctactgtctgaagagaagcccgggaggcgggagtcccgccgagcacgagcccagttctgcgcttgttactcgccagagtttgcagcggcggctaacaacttccgggcccacgtcgggcggaagcaggtgtgcagt

SEQ ID NO: 51071 - DNA, 312 bp, Mus musculus
  source 1..312: mol_type = other DNA
gcaggatctactgcagctagaagtgccggagtcttgagatgacaaggcttctggtgaatcatccagcatctggacaacagaggctaactcatgatcatcacatgccatgagtctatgatggttgatggttgcccacaaagaccactcagcttacctttaatcacagctcagagagctagcctcatagtcatgtgacttacagaacacctctgggtacactgaaattcactctgtagaccaggctggtcttgaactcagagagatctgtaaaggcgtttgacactacatctggtgtcttaaaattcttaattt

SEQ ID NO: 51072 - DNA, 589 bp, Mus musculus
  source 1..589: mol_type = other DNA
gtcactttctgaaaagattccttaaaatcagtcagacaaagtcttcagcagtgtctgtctacttaccacacactttttagtatacttatagaatggtgactgtctgctttaaactgtaaacttgcaggtacagttctaagtactgaagcttcaattaatactttaaatccttacataaattctcttaaagcctaggcaggacttagctgcactgaaggtgttatgcatacactttacacattttaaaaaaaattaacctctttaaagttttaaaattaaatcctaaaacgcttcgctcgcctgcaggatacgccccgcccgcctctgccccagcgcgtaacagagcggggagccaggctgccaagggcgtgtcaccgcccggggagccgggagcgcggcggcgtgatgggcctgctgggatggcgctgacagcagcccccgcgccgggccaaacggcgtttcgccccaatggccgccaccaacatctgggcggccctgcctgccaagccactgcaccagcgcgcccgacgaccagcaggtgggcggggccgcgagccggattcgggaaacccagctggccggaactgcc

SEQ ID NO: 51073 - DNA, 317 bp, Mus musculus
  source 1..317: mol_type = other DNA
gattgtaattagactgccagcattaaggccaggcttaaaaattaaatggttcctttcttggaagatgtaggaaaacaaacaaaaaaaccactcttctagtttctctcataaatgcattcatacggttgaagcgccgattgctctttcaaaagaataagagcaagctgagcgagtaaggaaattaagtgaaatttctaatataattctgttactgacccggtcaccaggccccaccccgtaggtcttcttccccgcgtgaggggcggggctgcgactgcgcgctcgcgggccgggtggcttccgcggcggccgttggc

SEQ ID NO: 51074 - DNA, 133 bp, Mus musculus
  source 1..133: mol_type = other DNA
taaggagacttaaatgctgagggaatggcagatagtaatctcgaccatgatgcacagggacccctgtgttcccctgatcccttcggaaggccaaggcgtcgggaggcgaactgaggcgtgtccgcgcgcggct

SEQ ID NO: 51075 - DNA, 261 bp, Mus musculus
  source 1..261: mol_type = other DNA
ccagtggccaaaggaacttaaagcaggctctgattgcttcctcagactgagactcaggatgttcctgctgcacgtgaggcgtcctcaccgagaggaggaaggccgctgacacgaagcaggcggggtcctctccaaagttttgctttgcagagaaattcaaaatgctgggcggccggcagtgggcagggcactgcaccccactgttcgaggcgttcacggggacaacgcccctggggttgccgggagctggtactcctggcc

SEQ ID NO: 51076 - DNA, 352 bp, Mus musculus
  source 1..352: mol_type = other DNA
gagaggaagcaatgaagttcagctcttcctggagccttactagggatccctttccaggaaccctggggcttctcctagctaacaaggactggtccaagttatttaaccactccaaatactttgatcacaagagcatttttgtggaatcacaaaatcttgcccgtagagattatattctagtagtttgatttcatcttaaagaaatttcacagtttttttttcaagaatgcgtgctgagaaaattggcaacttactctgttgtcaattgagcagagagtccggctctctccatgagtatgttggtaattataaaatcttataactgtatataaaaccccaagttggtttagaa

SEQ ID NO: 51077 - DNA, 282 bp, Mus musculus
  source 1..282: mol_type = other DNA
acctggagacttcactgcaggtcacagttaggcacctggtttccgaatagagattccgtatttcagagagcagcactctgcttccctcgctcctactccactagtgtctgaggctgggagtggaccaaaacccagtctgttatcccgcacagcgggatccgcagaaaaaggtggagggtcctgacccggtccctgaagatgcgggacttgcgccccgcccgcctcgtggggtctcatcgcgagcgcgcaggcagggggcgcccgagcgcatctaaaaggagc

SEQ ID NO: 51078 - DNA, 214 bp, Mus musculus
  source 1..214: mol_type = other DNA
tttacatgcaatataatttgcagctccaaagatgctaccatgttgacaaacatgtgatttttaagttgttgatcctaaaatgaacacatcaaataaatgaatttctcaatgggcaattcccctagttccaaagaaactcaccctgcacctagatgtgccaattgacacagaataataaaatttctcgagccactgcctatgttcaatatactca

SEQ ID NO: 51079 - DNA, 367 bp, Mus musculus
  source 1..367: mol_type = other DNA
ccagattttatctctgaacttaagtgagagaacacttttctgataaactgttcaacatttctacaaacctatgtcatctgatcacacccacttgttagtgtgtgttatattcacttcaatgtcactttcaaaatcagtcagactgaaagtcttcagcagtgtctgtctttaccacacactttttagtatacttatagaatggtgactgtctgctttaaacggtaaacttgcaggtacagttctaagtactgaagcttcgattaacactttaaatccttaggtaggacttagctgcactgaagcactttacacattaaaaaaaaattaacctctttaaagttttaaaattaaatcctaaaacgcgttg

SEQ ID NO: 51080 - DNA, 486 bp, Mus musculus
  source 1..486: mol_type = other DNA
ctcaggcctggctggacacttcctatgtgttaggcaaggttctagtgaactgtagagcgaaagcttgcattctcaaacaagcttatagaaagaactctgaaatctttattacatatacaggcctgaatatttgcaaacattcactagggtaactgtattaattccacccagtctggtatgaaaggctagctttatgttggagtgcaccaacgctgtgcctctgtttaaccacatagctgtgtagacacggggtggcggcggcgctggcaagccacggcccggggcctgcggcctgaggcctcggctgtccgagggttagggtctgtcatcgccgaagccgagaggacgccgctctcggagaacgggcggagcgcgagggggacagttgcgcccccatcggttgccgagcaacccgaggttccgcctggaggcaggaactccaggcagttccggccagctgggtttccggaagggtctgcacttccg

SEQ ID NO: 51081 - DNA, 337 bp, Mus musculus
  source 1..337: mol_type = other DNA
gaggggggtgcctcggtgggcccatgccaaggcatcccttccccctgactaaagtatagccctacctgggccagcgcagatgtgctcgtcccaatgagtctttggctctaaatatccctcagaactgctgaggatctctttcttctgggcccacaggcatccttttcagcagaaaggaacagggcttcacagggaagtactgcatttcattttacaataaaactgtttccatggtaatttcaaaaatacacgaaaatgtgctgttggttttttttttttttctgagaatgcaaaattttggattcccattctattcacagcactgggaagatgagcc

SEQ ID NO: 51082 - DNA, 297 bp, Mus musculus
  source 1..297: mol_type = other DNA
agagtggagatgaaggcatcctctcccaaggcagatatgacaaggcttcctctctacacccggatgccataccgccggtcctctcttcctggttaaacaggaacagtaagatcaaagattggattctgaggtaccatctcccaacgtgggtatctgaaaccctgatgttgaggggtgtctctgcagcatctggcctccggcctcagcagaactcctggcagaggtgggggaggggaagggcagagcctgagctgcagtcctccttctccctcccccctcatttagagccaattaagg

SEQ ID NO: 51083 - DNA, 145 bp, Mus musculus
  source 1..145: mol_type = other DNA
taaggagacttaaatgctgagggaatggcagatagtaatctcgaccatgagcacaggggcccctgtgttcccctctgtgctctgatcccttcggaaggccaaggcgtcgggaggcgaactgaggcgtccgtgtccgcgcgcggct

SEQ ID NO: 51084 - DNA, 357 bp, Mus musculus
  source 1..357: mol_type = other DNA
taaggccaggcttaaaaattaaatggttcctttcttggaagatgtaggaaaacaaacaaaaaaaccactcttctagtttctctcataaatgcattcatacgagtccacaacccttttacagaccggtatggggaaactttgacacgtttgaagcttcccagccgattgctctttcaaaagaataagagcaagctgagcgagtaagaaattaagtgcaatttagtgaaatttctaatataattctgttaatactgacccggtcaccaggccccaccccgtaggtcttcttccccgcgtgaggggcggggctgcgactgcgcgctcgcgggccgggtggcttccgcggcggccgttggc

SEQ ID NO: 51085 - DNA, 338 bp, Mus musculus
  source 1..338: mol_type = other DNA
ctttgatcagcatgtaaatccttcaaggtcaaggaccactgtactgcacagactgggatgcatctctgtagaaaaagtcttattaactgaatccatcactccagatgacttttttcacacttgagaaataagggtaacaatatccatttttcaaaaattatttgtcaagagtaaatggtaagtagccttgccttgtggacatagtccactaggtggacagctttcaaagaactttacagttacctagatgatatgtaatttccaagaatcaagaagcattccacagacttaataattctgaaatgaaaaaaatttgcatgtcacagtgaaatcattga

SEQ ID NO: 51086 - DNA, 256 bp, Mus musculus
  source 1..256: mol_type = other DNA
gctttttatcttgtaaatttcaggagtctccttgactgtactacacagcaaacacttacatctgaaagtgagtttcctaagtggatcctcacctcttgcttctcaagatctggcgaaggacaggttcaatctcactgcatggaaatggaagctagcatcatgaggtggtgctggggcacagcagggcacaagacaggccaggaatctccagataattccttttcaacttacaggctgtacatggttaaccatttgc

SEQ ID NO: 51087 - DNA, 474 bp, Mus musculus
  source 1..474: mol_type = other DNA
ctggcagcaggcaaggtgctgtgacttctctccaaaagataacatggggcagttttttatagattcctttaaaatcaatctgttctttagactatttctatacatagttgtttgagaacaaacaccaaagacacccatatcacaatgtatgttatgtgtagttcagaaaggctctggacctccagcattttatttatttatttatttatttatttatttaatttatttattttgtgcagccctggctcacactttttaaagggagcacagcactgctcaggctgcatctccagggagcacagcactgctcaggctgcatctccagggagcacagcactgctcaggctgcatctccagggagcacagcactgctcaggctgcatctccagggagcacagcactgctcaggctgcatctccagggagcacagcactgctcaggctgcatctccagggagcacagcactgctcagat

SEQ ID NO: 51088 - DNA, 539 bp, Mus musculus
  source 1..539: mol_type = other DNA
ccacccagcctggtttacggcagtgctggagatccgctgcagtccgggccctgcagacccttccctataaggggaaggtcgtcttcagccttttccttagcgaccgtgtggctgcgagcagcctgaaggcatcacctttcctctcctcaagagtggtagtggtgacagcccccccccccgccatgtctggggtgtggctctgagcctctgcgggtgtacaggctaaagctgcagtatgcacgctccggaacctgtgctttccacacgtgggcagccgaggctctgtgcagccgcccgcggggcaaagggacaggcgaggggtgacaggagcccgacctgcccaccacgccccgctgagaccccggaagcctgcccaggacccccgggcagaggcagcccctagcaaccgccagtcgtccgggccgccgggcccttttacgacggcagccccgcggcgcgcaccgccccgagggcaggcggggggtgtgtcgaccgcggcagccaatcccggacgcgctctgcggtctagcgcgtcgagc

SEQ ID NO: 51089 - DNA, 542 bp, Mus musculus
  source 1..542: mol_type = other DNA
tgtgcatgaatatggtcgttgtttattcttgttactataattaacaccctatcatttgtacaaattaatgggtttcactgtgacattaagatccatgtatatgtcaccagaatttttaaactgccactaattatttcaagtacatactgactccttcaaatcgaggtttcaactatattgtgagtactggcaatttcatatatattgaaaaacagacttttcataactactgttatcagattttttaatatagaagttactatacttcaaagggaaacatattaaaaactattttattggacatcaaggacgatttttattgtactctttgtaatctttcaaagggcaaagggacggggaacgctggagcagtttcatctgtaaaagattagtgaaatcgttaaaataaaggccatttcattacgggcaggacctgtcactcagtgcctggacagtcatgggccggacagacagctctaactgtgtccctcccaccagccccctgcgggcacccgtgggcgcgccggaagtgacgtaacccg

SEQ ID NO: 51090 - DNA, 327 bp, Mus musculus
  source 1..327: mol_type = other DNA
atttcccgtgggcctgagctcaaggcagagctgggtcccctggcaggggcagaaggctcctgtgagccagagagctctctggaagctagcgagctgcctgagtgtccagttgctactggaaaactcaccctgggccagagctattcattgtgatgtataaacattgtacaacagataaaacagaacatgtcatatatttcctatgttgctattgtataacaaaaccttgcctattcatagacaacaatggctttaatgtgtaaataactcccaaggagtggtatcttgggatgggtggggggggacctaggtagcgcctaaaagccc

SEQ ID NO: 51091 - DNA, 461 bp, Mus musculus
  source 1..461: mol_type = other DNA
gagtgtccagttgctactggaaaactcaccctgggccagagctattcattgtgatgtataaacattgtacaacagataaaacagaacatgtcatatatttcctatgttgctattgtataacaaaaccttgcctattcatagacaacaatggctttaatgtgtaaataactcccaaggagtggtatcttgggatgggtggggggggacctaggtagcgcctaaaagccccacccggtactggcggctttctttggctccaaattcctctccggagtcgactccaccagtgacttggtgctaccagttccccttcacttctcgagccatgggtgggtgccagctcccgcccagtctgcgatagccgcagcccctagcagcccgggacttggcaagcccttgccagcgtgcgctcctcctcctgccgcccggcccagcccggcgcgtctcggaggtgcgatcca

SEQ ID NO: 51092 - DNA, 408 bp, Mus musculus
  source 1..408: mol_type = other DNA
ctcagccataaggtcttactgtcaagttctatagtgtttgtggatctaggacttcaatgaccaacaactacatctaaattgtccccttggcaactattttgttgaactaaatctttgccatgcatatttttaaagatttgtttattttactttgtatgtatgaatgttttacctgcatgaatgcacatgtagagagaatatctgtgtatcataaagagcacctgactgctcttccgaatgtctgaatacagctacagtgtacttacatataataaataaatagataaatcttaaaaacgtgatcacctgagcgttctctttagttatgatctagtcagaggagagcctagcatttgtaaatatattagttctacaaaatggtgttcaacttacagcagttagaaccca

SEQ ID NO: 51093 - DNA, 131 bp, Mus musculus
  source 1..131: mol_type = other DNA
aagaatctctatgaagctatctgatctgcggtgggcctgagatttaacaaaattcgtttcgttttggatgaccaaaataactcctgatgcagaaatgggagtggcttggatttgtgacaaatgcccgcctg

SEQ ID NO: 51094 - DNA, 237 bp, Mus musculus
  source 1..237: mol_type = other DNA
aggctggaagcatggcagcatccaggcaggggtggtctgctatgaggagacttgcttccaggcagctaggatgagggccttaaagccaggctcatctcagcacctgaggagcactgcaagcctgcaatctgattgatggagtgcaagcctctgcagagccagcccctttggaccacagggggcacagctgtgacatttgaggcttggtctcaggccctcaccagagtgcctctagcc

SEQ ID NO: 51095 - DNA, 834 bp, Mus musculus
  source 1..834: mol_type = other DNA
ggggagcgcctgctccgccagtgggcgtcttctgccgccgccaccaccgccgcctccacgggcagcagcactgcggcgcttttctccgctgctctggagcagccgccgcggctcaggcgccggccggagcttgcacacaccacgccacgcccgcaggcagcgtcccggcagcctcgccaggccgggaaggacgcggatcgtgcgtaccagcccgcaccccggcgcagcgatcgggactcgtccccccgcccgcggtcctattgaatcccaaagggagtgaacccccgggccggagaggcaccctagacccgagaggcggaccggaccagagcctgggcagcgtcgcggggagggccggtgctgcgggggcggagcccgcagagtccgggccgccgcgccctcccgcctgccccccttgcaagctggggaggagggccatggctagcccggaggagcggctcgctccccacccccaggccccactgcgggagtctggggacgagcccggccgtgtccaagtccctctggaaccccggtgcggcgcggccagcgggcggagtacagtgggcctgagcctggcccgggagctgcttggctgcagccgggaggagctagcggcgcccccgcccctgtcccggtccctgtctcccgcaggccacgccagccccactgggggccccagcgccctctccgctctccgtgccggaggctgtggttgggtggcggcgctccctgggctccacctccccgcgcgtctcccgagaagggagggcgcagcggcggcgaggcggcggcggcgatgctggcggcggcggcggaggaggacaagaggca

SEQ ID NO: 51096 - DNA, 429 bp, Mus musculus
  source 1..429: mol_type = other DNA
atcttggacttccaagtgagaaataatatttttgatgtttaactttcagtttgattaatttttaagctctcaaaatcatcgtatgaatagagagttaccttcaaaggaatctctctctctcccctcacccctgctcatcccaagtgtgtgtgtgtgtgtgatatgttcatattcatgtgtaatcaagactctagtttgagctagaatataacaaacaggattattcactgagattattttattttattttattttattttattttattttattttattttttgcttgcaggaaataaatagctcccttaaaagcatctttatctgcccctgaggtcagtgcagagcatataaggtgtatgcttcaagctcagaatatttaaaaaatagtccggaacccaggtagggaggccggaagcagcccgcccgtg

SEQ ID NO: 51097 - DNA, 312 bp, Mus musculus
  source 1..312: mol_type = other DNA
cccccacgtggggactgcagtgataataattgaatatacttctccttcaatcactttgatagacgactaaacaatattaagaatcgacacatatttgaatttttgtcacctaggtgccgctcttactagcacctctggttcttgcgtctagaaccaaggaggggacaccagagttttgttttgcaaagtaaactccagggctcccagacctggctggggaaggtggcagactgttattctgccaccctgtggccgggcgccagagttacactgtactgtttccatggcaactgcagcttccgttggcaactg

SEQ ID NO: 51098 - DNA, 751 bp, Mus musculus
  source 1..751: mol_type = other DNA
ggacctgcggtccgcgcgtcacaacagagcccgcccgcacgcccgtgggtgcgcacgcgtgtgccgtctccgcccacggtccggggccgcctcgcagcccacggcaacgcgaggcccgtcacgcgtggcgctggctccaggggaaacctcactggagtccctaccgccggagacacttgcggtgtgggcgcccacgccaactcagtccgccgccacctcgcaccccaagcgatccgacggccgggtttcccgccccgcgaggtgggcgccgcgccagaacggttcggtcccgctcctccggcgcgcccaccccccgcccccacggcgcgctctccgccaggtggggcggagcgaccctcggaaggggcgcctcgacgcgcgcacgcgctccagcctctcggctacgtgtctggacacgtgacgcccaccaggacgtttaaaaaaaaaaaatttttttttttttgagggggcgcgcggacgcgaggcccgggcggcggcgagcgcagcgcgtcgcggagagtcccgccgggattcctctcagccgccgcacccgaccgcgcccgccgcctcagcaacagcgcgccgacgagccagcgccgccgcccgcgtccccctcagccgcgaccccggccccgcgcgggcggccaccggcgcgcgtcctccccgccgcggcccggccctgcgccggccgtcccgcccgagcggccaggggcggcggcgccgcctgaactgaggcgaactccgccgccaa

SEQ ID NO: 51099 - DNA, 267 bp, Mus musculus
  source 1..267: mol_type = other DNA
aactgagttctggggagtcagaccaagttgctaattgcctcaattttacagctgagacagtgactggtccacgagtcagtaagtgactggacttcaggaagttaaatggtcaataaaggctctagtattagatatgcccttataaggcttatagcttataattataataactgaattgcggtacaatcaatatacattgtatccatgcaaccaacaagtccttagggttctttcctaacaagtggaaagatatttgaagcttctaag

SEQ ID NO: 51100 - DNA, 397 bp, Mus musculus
  source 1..397: mol_type = other DNA
taatcaagtaggatttcagagtttagctcaaggttccttggcctttaagcaactttagttacttagaggtggcagtgtactaccctctcatcctgctgtgactacatgtgcacatgggggctcaagtccatgtgctgtcttggcaggaacagctcaggtgtggcacttctttgtgctggagtgactccaacgacaaagacaggactatgcctggtctccttaatgcatttatttaaatatatctggactgtttaaaagacaacagtgaatgcagtgtttcttttggtagagcaaaaggcacttgcgctcagatggaaggcccatttcatctgcagcatgtgatacatgagttctccgtagtattttgagacatcatcatcttttcaaataaaagcaa

SEQ ID NO: 51101 - DNA, 557 bp, Mus musculus
  source 1..557: mol_type = other DNA
aggtccttttcgtctcagatctccgaggacacatttaaaaggacagcttgacaacagacctgggctggtcaccccgtggagcggcagggcgagccccgccgtcgggggtcgcagtggagcacgagctaaccttggctaaggcaggacaccggaccaggctatgggcggcggacggagcgcggcacgcacgcctccgccgtgacactgacaggtggctcgggtcggcccccgaggatcccactcggacccgtggggtgtgacgtggtgccacacacggacgcggggcggcgcgattgtacctggcaggcacccacgtacctatcatggtcaccgggcgggtggtggctgcgggtcgagaaggacctacgcgggcactggcgcccgcccgagcctcccaccagcgcctcccccttcccctcgcgagccaggcgggcgcagtgcgcacgcgcaaccacccgcccctagcgcgaagcctgctgggaggcgtagtgcctccggcagctgcaactgtcttcgctggtaaccttttccggaaacgctcgtcacggaggggaatc

SEQ ID NO: 51102 - DNA, 467 bp, Mus musculus
  source 1..467: mol_type = other DNA
atgcatgtagttgggtaaatgtaatgcatttcagtatttaaatctgtacatttttgctaggaatatcttcaacaaggcctttcaaatttaagtgactacataaaagcaaaaataaaaagtattttcctagaccttcaagtctgtgttatgttttcttacgatgtaacaaaaacatttgcaaacaaaaggtgttgttatttgcaaaatatctattatagtgcttgccaggtttaaagtactttgaaagtgtttgttaaataattaagggtaaatttttaaaagtagcatgtatttttttttttttttgcaagcatatatatttaaaaagcagattgtcctggccgcaccaccgtctgtgacactctgctctgaggggtgtgcaggtgtctcagggccctgccaggctccatacagcagggttgcaaagatccccatagccatggatgtaatatattttgcgatgtaca

SEQ ID NO: 51103 - DNA, 561 bp, Mus musculus
  source 1..561: mol_type = other DNA
caaaggtcttgtactgagtggactaagtcccttaccagtgaaacagcttaagtgtaatttggggtagtggagaaagcacacttgctcaacactgtcgggcagagtctgctactgaccgagtcattgccagttctggtaaacagtaccaggacccagggcttgtcatcctttcccctgattcggagcaagtgcgttcaatcgaggaagatcacttacgactgagttttcatcatggctttgactgtgaagcccggctggtgcacctcttcctagaaaacgtcttgttcttatcagaggtgtggaagaaaaaccagtggctttttcaacccctcgtgctgcccagggagatccagatgtttcgaggctagagtctctaagagcttccaaaggtgtaagcctcccggttgctaagcgattcccctccgtgacgagcgtttccggaaaaggttaccagcgaagacagttgcagctgccggaggcactacgcctcccagcaggcttcgcgctaggggcgggtggttgcgcgtgcgcactgcgcccgcctggctcgcgaggggaagg

SEQ ID NO: 51104 - DNA, 216 bp, Mus musculus
  source 1..216: mol_type = other DNA
catctcataaactacattgatgggcttaaaggaaaattttctcagatttttaacaatcattttcattagaaatgaaaaccagccgctctgagttcgaggccagcctggtctacaaagaaaaaaaatagaaatgaaaaccattttctccaatttctcccgtttttaaaatgtgtatgtgtttgtgtatgtgtgtgcacagacagagacagacagaca

SEQ ID NO: 51105 - DNA, 399 bp, Mus musculus
  source 1..399: mol_type = other DNA
gcttctgcagcctggaggaggaacttctcagtactgctcgcgctagaaagtagtatttgaagggcacttctcagacccttgctaacttaacaagagtgtaaatgtcatgtttgcctgcttgtgcgcactagcatgagtaggcagtcctgcatccatccacaggagctccgggcatcctaggtcttgccccccacccccaaacgaaatggcacaggggacttggggcgtggggaggccactgggatggctttgttatccacgcgggtgactactcgatcccaatccccatctggctccaacaggaggcggaaggagagggtgactcatgttacacggggtcccctcccagtagctgctaagtcgtagctttatcccttcccgaagggtccacccctttgg

SEQ ID NO: 51106 - DNA, 702 bp, Mus musculus
  source 1..702: mol_type = other DNA
ctctgggtaccaaagttccatcttggagcttcctgacaaggaaccttgtctgtgccgagaggcacgtcgcctctcttttcctggaaaaaggagaaagatggaccaccttccttccatccgatcactgatccgagcccgagcggcagtccggggcaagctggggctgtctgcagcagggccccggggagcactactgcaaaggccagggtcgctcgggagcttggcctccgagcccgggcaggggtcgcgcggaagcggagcaccgggctccgcgctgcaccgcgcccctcccgccaccggaggtccggatgctccgcgcccacctggcgcgcagccgaggacccccgagctgcagctgcagccgtgcactcgccgctgggcagcactccggatccggctcgggctgtggcggcggtgctggccgcagctcctccatggcggctgcaggggtgtcggcgagggcaggagggggcaccggctcggcgatggcgtctctcatccgcggcgggtcgtcagctgcagcctggtgcgagccgcggggtgagggagtgactcgactccgcctccgcctctagcccgccgcaggagccgtgcgcgcagcggccatcttgggaacggcggccggccgaacgctgggctacggcgggcagcgagggacacgcctcggcgggcggctgagtccgcctgggcggggcgaggcgg

SEQ ID NO: 51107 - DNA, 366 bp, Mus musculus
  source 1..366: mol_type = other DNA
atatatacctacatacacatacatatgtatatatctatatatacacatacatatgtatatacttatatatacacatacgtacatacatacacacacacatgtgtgtgtgtgtgtcctcaaaggccagaagaggacattagatctcctggaggagcagcagtaagtgcttcacttaccactgagttcgcccggcaatgcacacaccaggacagaagttatgtactgcttaagtgttgtaaaaatgatatgacttagtcaaactgcttagttaccccaggcccctcttctgaaaatgggaacagggtacagccgattgccagtggcagaatctggcatatctgctcaaacattttgtaagataattaa

SEQ ID NO: 51108 - DNA, 509 bp, Mus musculus
  source 1..509: mol_type = other DNA
cttatttgtttctcagcatcccgagtagtaagggtgagagatgctggagcaaggcagcctggctctagcattcttagcgcgctatcacaggttgctctgcaacctggcagctgacacgatagggaccacacatgctataggctctgtagctcatcccacccggagctggaggaatgtgatgacgcaggtgcaggtgcaggtgcaggtatgaaactgttcctggagctagcttgtcactttgagagcacagtggcttgggcccctgcagcctaagagtactggaggctattcctggagtcttcagagtcctgagtccagcgagtctgggtgatcctggaactcagtgaactctgacttggggtgtccctttagggcaggtgggccctggtgcacagtgacactactgtggggtttactccggtcccgggcgcgcacgggcaggaggccgggagagcagcccggggcgggctgccagggcgagaggcgggggcggcgggtgcagagctacg

SEQ ID NO: 51109 - DNA, 270 bp, Mus musculus
  source 1..270: mol_type = other DNA
ctggtgtacacgcatgcgtgtgtgagagaccctatgaagtaggtgtgttattagacttatttgtttctcagcatcccgagtagtaagggtgagagatgctggagcaaggcagcctggctctagcattcttagcgcgctatcacaggttgctctgcaacctggcagctgacacgatagggaccacacatgctataggctctgtagctcatcccacccggagctggaggaatgtgatgacgcaggtgcaggtgcaggtgcaggtatgaaact

SEQ ID NO: 51110 - DNA, 316 bp, Mus musculus
  source 1..316: mol_type = other DNA
atccttctgtccagcaagaaggagagattgcctgtttccctggcaaggcatccctaggttggagttactaacacagttggcacttgacctatatatatgacaaatgtgttactctttcctcacaagtgggtgaagaggaccagaccctggtgcacattgcattgggcatgtacaaccaagtacatggatgtctctgtcacaccgacacagctgtataggtgacaagggtatattaattttctggccacttaacatgctagggccagggcctgctctgggctcaccctttgactcttggtcaagagtcgtcctgagc

SEQ ID NO: 51111 - DNA, 279 bp, Mus musculus
  source 1..279: mol_type = other DNA
aaaaaagtatttaactaatttttttttattgtagacatttgatttttaaaagagactggatattttaaaagaggatgaatttctaagtgcttgaacctttaaagactatggagccccacagagtatcttagttagtttttgagacaagatctcatgaacccagagcttcgtacatgccaagcaaagaattgctcttcagaaggtgtgtgtgtgtgactatgcacactcaagcctcctgccaggccagagccttggaagaggccaacttgatttcaagcc

SEQ ID NO: 51112 - DNA, 348 bp, Mus musculus
  source 1..348: mol_type = other DNA
tctcaaaagtgagtcacctgtttttgtctctgtttccagcccaggaggctggcaggccacagcagctgtaatctatagaatctatctatacagaagaaatcaatgtagtcataagtaaagatttattgaacacatgggatggagttaattaaaaccagagaacttttttttaattgtgctttgcttaaatgtgcctaaaataaactgtaagtctcaaattttgaaccaatactggcaactgagttgtgtggaaagataaccgtaatatctgttattcaagtcttctgacctgctcagcaggcaatttatagacagttggggcggaacttaataatctccaccccctgc

SEQ ID NO: 51113 - DNA, 490 bp, Mus musculus
  source 1..490: mol_type = other DNA
cacattcagccagcctggctggccagcaaacatcggagattctgcctccccaccaaagttccaggggttgggtgctggggcttgagctcagacccgcaggcacattacattatgtaatatggatgctgcatattatctttacagaataataaaactttgtaaccggtaggcttaagtagagggatctgaactccagtatagcctgagacaaaatctcacgctaaaagttttttttcacatttccacagagctgctgtgaggctctccggggcatgagtcggaaactcccacgcgggctctgaggcgtcacccctcgccgcgcgtgagcaaccctggggttgtcaggcctcgagtaggtacctggcgctcgtgcccggcccgcaacacttcctgtcccgcgcgcgtgcgatgctcatgtgacccgggacggcgggggcgggccgactcaggtcacgtgacgctccggggacggccacggagcgcctcctcg

SEQ ID NO: 51114 - DNA, 320 bp, Mus musculus
  source 1..320: mol_type = other DNA
caaaggtttatttattattataaataagtatactgttgtgtacacacctccttccagacagaggatgtcagacgttcaggctgcagctgtgacatccgacctcaccatgtgggcttttaaactccatgtctaagaaatgtgctcttccagccaatccctgtacatggtcactgagatctgaagactaagtcctgccctgagagcctgagatttgactctagtcaggtttggaagataggatttctagcatccctgaggtcaattggagcaggacagtgcacactgggctgtctgtcagcatgaaagtcagaagggagccc

SEQ ID NO: 51115 - DNA, 458 bp, Mus musculus
  source 1..458: mol_type = other DNA
tctgtctatgagcatcttctcaagctcctctacacacggtagggcgcaatggcgccgagccggccgctagtgagggcggatccggcttcactgggcccggcggacagccccggcctacggactgcggctgggcttcggcctgcgccgccgcgagtgggagcggaccgcctccccagtgctgcggtccccgaacacggaggccgcagacaaccgatagctccgctctgagaccgtttaacggccaccacggcggggaccacggcgtggaaaggcccgagcgatgccgcggggcctgctgggtaacacgccctgcgcgctctccccaaccgcaaggtctgccgggaaagcggctagcgtgtcccgccctccgcctggtgattggtgagccagggataccgatcgctcactcggccactcagcaccagggagcttgttagttccgggtccttgagacacca

SEQ ID NO: 51116 - DNA, 563 bp, Mus musculus
  source 1..563: mol_type = other DNA
tgtgaacacgtagtgcacacatgtagtgccggcaaaatatacataaaatgtattgaaaattgtcaagatcacaacccctctccgaaagttgctaaaatgtgaaaaagacatgtaaacaaagcggcttcatattagtcacgtattacaagtgagatgccgaggcattcagcattcaatagcatgagtcagtctgatcaatatataccaaactggagacaggaatatacacgtatatttttttcttccctcatcttagaagcccaggttctctaggggactaagtccagattggtatcgctggcaggcgtttctataggctaaaggccatactagctgatcgccggtaccaatgatctttcagcacagctggcatagccctggctgtcctggaactcactttgtagaccaggctgtcctgctgggataggcgtgcgccaccacgcccggcaagctggcagttcttgatggcaacagtctccacttttcccagctggaagatcaaggctgtgagctccacacacgtgcacgagctttaaggccctgcgcagcggaaacgcgtgggc

SEQ ID NO: 51117 - DNA, 413 bp, Mus musculus
  source 1..413: mol_type = other DNA
caaggcaactaactagttgcttgctccgacacatcccgaggcttacctggcaggatcaagcacagctcacggttaggccacacggtagccccgggctgcacggccggcgaaaatgaaaaagatcacatgcatctttcactttcccacatcaggtacaaaatcgcatttgcaaatgcacacgtactgtgcattacccagtttcctgcaaactggctgacgggacctgggcaaagtcacacagtgccctggtgtctcaaggacccggaactaacaagctccctggtgctgagtggccgagtgagcgatcggtatccctggctcaccaatcaccaggcggagggcgggacacgctagccgctttcccggcagaccttgcggttggggagagcgcgcagggcgtgttacccagcagg

SEQ ID NO: 51118 - DNA, 297 bp, Mus musculus
  source 1..297: mol_type = other DNA
gttgatatacataaaataaatctagtaagattttttcctttggaaaaatatatatacatgtatttatgcacatatatatgtatgcgcttgtgtgcgtgcatgtgcagaaataacttctgcttgcacacagacaaattctgactttggctgcaggtgttttaagggacctttaatgaataagatcttcagtctagccaagaacacacttggagaaatctcaaagttcctgcgaattgatcttcaccatccctgagctgaggaggagtggggatggcggagccgttgaggctccatctc

SEQ ID NO: 51119 - DNA, 258 bp, Mus musculus
  source 1..258: mol_type = other DNA
gggaagtcccttgcattcataatctagaatttagcctcatctctcaaaatactatttttcactgagggcaagacttgcctagaaagcctttccttccaacagattctggcagattctgtctttggctgagagatccactgtaggctaggttccagtgtcacctggaggaaagccttctaggttgggtagttcctgcgcaggcgtgaggaggcgtggcgtggaggccatagctccgccccccccagcacagcctgtcag

SEQ ID NO: 51120 - DNA, 588 bp, Mus musculus
  source 1..588: mol_type = other DNA
tttccattataaacaaagttgatcctccttctatggaatattctgggaagtgctgaagagactgccgagcaccgctgttcttgctagagtactcccggggcttccagtctgcccacacgcgcagccgggcgacggctgcccccaacttaaaacgaggggcgcttcgttccggcacgatgcgcggaagcctgtcggctcggattcctccgcccaggccgcgcagcagccgcaggtggccccgccgagcttgtccggcagcggccgtcgtcccgagatgcctcgcgggtgacctccgacctcgcgggcccgttcccagccccgctgagcttgcagagccccgacggggccggtgcgggcttccgcggactgtctccgtgcggcggcggcgtagtgccgctgcctctccgcgccccgaggtcccgagcggggccgagccggccgcccctcgccccttctctccagaggcgcccggcgcggtgaccgaggaggcgcccgagaggcgcgtctcgggtgagtgggccacgggcggggtctccgcggcgcgctcggggcggggcgcagtccgggcggggcggggccggcggcagg

SEQ ID NO: 51121 - DNA, 422 bp, Mus musculus
  source 1..422: mol_type = other DNA
atttgaattgattccttcgtttcataagttttgaaaactcacaagtcttgtctcgatatgtgcctacatatatgtgtatatgtatttctacaccttgcttacaggatttcaatgtatatttccattataaacaaagttgatcctccttctatggaatattctgggaagtgctgaagagactgccgagcaccgctgttcttgctagagtactcccggggcttccagtctgcccacacgcgcagccgggcgacggctgcccccaacttaaaacgaggggcgcttcgttccggcacgatgcgcggaagcctgtcggctcggattcctccgcccaggccgcgcagcagccgcaggtggccccgccgagcttgtccggcagcggccgtcgtcccgagatgcctcgcgggtgacctccgacctcgcgg

SEQ ID NO: 51122 - DNA, 450 bp, Mus musculus
  source 1..450: mol_type = other DNA
tcatccttaggaggcctgcaactttcttagtgttttctaatcagggaagacataaatgttatggaaacatttgatagccactgcttcttagactaataagtccacaaagggaaacaatgtcctttcgacgtgatttaatgtcaggttaggccccagggaaggtcactccgggcataaattaactgggtcagaggggccctgattacagccttggctttccggaggaaagtctccggcggcccgaggaggggcggagccacaccgcggggcggacggggttccccgaggcggggcggggccaaggccgatggtgggggcgtggctgtagcaagcacgcggcctctaccaatttggcacaggggagacggccgggccgtccgtgtcgccgtcctcccctccgctgatgggcgctgcgggcagggtcaccgcttcgctgtgtccttgcggacg

SEQ ID NO: 51123 - DNA, 546 bp, Mus musculus
  source 1..546: mol_type = other DNA
gacccagacagaagacttaaattatattggcttcagcctttgcatgattaaaaggaattaaattaaaatgaagaattcactgatgaaatgtagttcccatctggaaactcttgcttgcagggcacaaaacccaaggaaacattctcttgtgtgtgtacacacacacacacacacacacactaaatgaaaagttcaactttaagtagccaagaaatctgaaatactctttcaagtgaatatgaaaatcagctttgacctaatgtgtaaaatccttagaatcttaccaaatgtcatcatttgaggggaattgtaaacgtttccagtcactgtttgaagtgtctaaaggtgcagatatcgtcatgtcatgaactgttagggccctggctttgaagcccctgacagtttcctctttctcagggacaaatgaaacagcaaaatggcactgtttcagtattatgttctcactgaatacatgcagaactctttgtgacagtttccttttttctcagaggaagtagcacagtgaggcctcctggcctctctctc

SEQ ID NO: 51124 - DNA, 374 bp, Mus musculus
  source 1..374: mol_type = other DNA
gagaggaagcaatgaagttcagctcttccttactagggatccctttccaggaaccctggggcttctcctagctaacaaggactggtccaagtatatttaaccactccaaatactttggggggtaagaagatccttgtccatgatcacaaaaaccagaagcatttttgtggaatcacaaaatcttgtcttaagcccgtagagattatattctctttgatctcatcttaaagaaatttcacagttttttttttcaagaatgcgtgctgagaaaattggcaacttactctgttgtcaattgagcagagagtccggctctctcccatgagtatgttggtaattataaaatcttataactgtatgtaaaaccctttaag

SEQ ID NO: 51125 - DNA, 457 bp, Mus musculus
  source 1..457: mol_type = other DNA
ccgtgcacggggctggtggcctcactgtgatgcccaaagctgactttcaatctcctcttgggaagtgtaatagtgtgccacagaggcggtcttatcaatgccagctataagctaaccccgccgccccgggggcgggggggtgtaaaagtgccatctggcttacttgaagtcacatgactgagctgcccagtccagacacagactatccagggctggtgtgaagaatgatccctgactacttagttttggtttctcagaagtcatgacaataagcaaaatgggccgagcgcagattgtaatagagttacaatgtaacactaagcaggtgccagctgctggctccggaactgaaaatggaccataatgaggggctctgacatcacctgtggggtgatgcacaccctctgtagatgacatccagatgtgaaagccagcccccctgcagtgagagcagagc

SEQ ID NO: 51126 - DNA, 306 bp, Mus musculus
  source 1..306: mol_type = other DNA
tgtttttgatgagaatccaaaaccttggaaattatgagaaacacctctttctgtcatcctcacagtaagcagggatagtttattgtcagactcagaagtttagactgcaaccctgtagcaattctaactgaccttagttattatgattaagcataaagcttaatgggatatgcagttaatggctgtaataactgtcagaaaggcattaatgagtaggacctttattattattattattttttttaatattaagtggtagcatcacggcctagaggttttgatttctaaaagccctgtttaagctgt

SEQ ID NO: 51127 - DNA, 367 bp, Mus musculus
  source 1..367: mol_type = other DNA
cctatggagaggaagcaatgaagttcagctcttccttactagggatccctttccaggaaccctggggcttctcctagctaacaaggactggtccaagtatttaaccactccaaatcacaagagcatttttgtggaatcacaaaatcttgccgcccatagagattatattctccttgtgaacatctatgagtagtttgatttcatcttaaagaaatttcacagtttttttttcaagaatgcgtgctgagaaaattggcaacttactctgttgtcaattgagcagagagtccggctctctcccatgagtatgttggtaattataaaatcttataactgtatgtaaaaccggtttagaatggacaggttt

SEQ ID NO: 51128 - DNA, 252 bp, Mus musculus
  source 1..252: mol_type = other DNA
aggtttttgatgagaatccaaaaccttggaaattatcaagcagggttagtttattgatcagactcagaagtttagactgcaaccctgtagcaattctaactgaccttagttattatgattaagcataaagcttaatgggatatgcagttaatggaataattacctcacggcctagaggttttgatttctaaaagcctgtccctcccagccctgccaggacaggtcctgatatgaccacatgaggagcgctgt

SEQ ID NO: 51129 - DNA, 430 bp, Mus musculus
  source 1..430: mol_type = other DNA
ctaaacgttaaagttttgactttactttttggcgggtgtattttgagataccccttttttcaacccccgatctgcaagcagaatattccgatcagaacttaggttgctgatcctaggctcggaaactctgactcaggccggctttaaaaagcccagggcgggcgtggccagccctccggatgaggcacctggcgggctgcttgggtagccccaggctgccccagtgggagctttagtctgaccctgccttcctttgaggtggacccagctccctcaagggatttgaccctctgcggtcagaggattggctcgaactcttccccctcccagggcagaggccctgaaaggagacaacttgtaagcagtctaggcagccccaccctggggtgggctggcctgccagtgtctgatgttctcaccattgtggtga

SEQ ID NO: 51130 - DNA, 706 bp, Mus musculus
  source 1..706: mol_type = other DNA
tgttacttctcaacagaaaacacatcttttcttaatcagataagacacttgactagcaatattttacttgcaaagtttatcctgccatttaaaaaaaaaaaaatcaagctaattattctgaaagacaaaataatactgaaactatattgattcagggctcctttctaaagagatttgcttacttcgttacagaagatgaattatgaatcaggagtaacttaacatccaccggtgttcaaattggccacctgaacctaataatgaaggagaggaaaacctgccttcctccaatctgagaagactgctcagatctaccaaatctgtgttcgcggctaagcgctggctgctgtgtttcagcaagcacctgagctatttccaaatccggcacaagtcctgggtatagtgtggggtcgcgtggaacaggtctgcccagccacaacttaaccaaacgccctttggcccgctgtctaacggaggcttccccgaggcttcccgccggccacggtaccaaccggctggctggataccggccccccgcagccccgctgcgtaccgccagcgcacggggctggagcaggggtttatctgtctgcccgctgcgcgccaccggaccccgccgggctagaacgcacgcgcgccgtggggcgcacggggctcacaccgccgcgggcatcggccggtcacgtggcctcggaggggccgagat

SEQ ID NO: 51131 - DNA, 854 bp, Mus musculus
  source 1..854: mol_type = other DNA
ggccctggggaggagcggccgcgatcatgtcggcgggcggccgcgacgaagagcggcggaagccaaccggctggacctgttcgagatcagccagccgaccgaggtgagcgccgccgccgccgccggggtgcgaggggagggggcccgcgcgcgggccggcgacgcggaggccgcgggaggcagagcgcggtggggtcccgcggccgcccctcccccgctggcctgcccgcccgcccgtccgcccgcggacccgccctcgcccgcggccctgtcccctcggcctccgcccaccgtactggccagcggggtccctaggggcgctgtcgcctcctgcggtgccccgccgcccgggcggggtccagggcggcttggtggccggcgcagagggcgggccggccacctgcgcgcggagacacacctggacgtgcacttgtgtccccgggactccgcctggccacccacgtgggtcctcagacccacttgtgtcctcaggccccgcttgcgcccacaggactgcacctggccgcccacctgtgcggcacgacccacctgtgccctcccggctgccagcgcaccggtccccgtcgcggcccacgcaggccgcgggccttcccctgcgggatgcgctcctcgccgccggatggcgtcttcgaaccgtcgggacgcggatctcggcccctccgaggccacgtgaccggccgatgcccgcggcggtgtgagccccgtgcgccccacggcgcgcgtgcgttctagcccggcggggtccggtggcgcgcagcgggcagacagataaacccctgctccagccccgtgcgctggcggtacgcagcggggctgcggggggccggtatcca

SEQ ID NO: 51132 - DNA, 274 bp, Mus musculus
  source 1..274: mol_type = other DNA
aaatcattgtgtaaatgtacccacatttacatgttggagcatctgggtatatgctctaattttctgaggaactgccagactgatttccagattggttgtaccctgatgataaagaatgttaaacatttctttaacagggtttctctgtatagccctggctgtcctggaactcactttgtagaccaggctggcctcaaactcagaatctttttctttttttaaaaaagatttattttattcatatgagtgcaatgtagctgtcgaagagcagtca

SEQ ID NO: 51133 - DNA, 667 bp, Mus musculus
  source 1..667: mol_type = other DNA
cttctttctgacaaaagaagaaatctaactggtagagagaaaacatatcttctcactggaaagatgaacaggggaaaacagctctttccggatgtgttctccagcaaacagattgtttttgtaaaccccagagcatttgctgttcaagataatttttgggtttctaggttcaccgggaggctttaaaagattgaggtggcatgcgctccgcggagacacaaagggcgccgccgctccctggccgggtttatctttcctccggagaaaggtcagctgggatttgaccccagcagccagcgcagcccaggcgtcagggccgcggcgggatggccggccagttccgccggccgcgcagcccacgcccacctgtccatcccgctctgcagctccgggtcgccccgcccgtcagggcgccgcccctctgctcgctcgtccgccacccctgagcctgcccagggcggaccgagcgcggccgcaggaccgagcggctccggtgaggactcacgcctccggcacagagcgagtgcggcccgctgacacccgacgcgcccctgcacgcacgcacgcgcgcgcgaccacgcggcagcacctagcggcgcggcgcgcgctcgcggggacgcgcacggcgggcgggcgcgcacggcggcgggagggcggggggcggcgc

SEQ ID NO: 51134 - DNA, 551 bp, Mus musculus
  source 1..551: mol_type = other DNA
agatacttaacttcctcctgcccacaggcctgggtgctctggatggaggcaccttcccacccctgcttgggaggaaatggcactcaaggaagagaaaagcattttcatccagcttcttcctaaggaacatgaagactatagatactctactcggccaagacagtgtccacaggaggccgctggggggctgttgctgaagtgaccaccatggtgagagctgcacacctcaggaactttctagaagcttccttaaaggtgttttccatgtacattggcgaacctggtataggattttccattttaatcagcttacaaataggaacgtgcgtcttgcaatgtaaatttttttcttttgtaatttttttaaatttaaaaacctaaacaaaacctttgcctatgcttgcggaggggcttttggccttccccgatgagctcataggtcccaggggcgcaggggagggcgcggccggtcgacggggcgggcagggggcggccgctgtgacctcgggcgtcgcaaacaccgccctccgcggccagcgataggctaagcg

SEQ ID NO: 51135 - DNA, 190 bp, Mus musculus
  source 1..190: mol_type = other DNA
gagctccagcgccgatctcacaggaatctccactgtttgaagcggccacatcaatgtgtgcgctcacctttctctatgcaggactcctggtgttctcagaggccctaccgagagccaatgacctccgaaggcgccctaggccacacagccctgcgcgccgggcggcccctgcgcgggcgcggtggctaag

SEQ ID NO: 51136 - DNA, 304 bp, Mus musculus
  source 1..304: mol_type = other DNA
gaggttgtgggagatgccacaaatctaccatcttctttggaagtgagttcaaattaaaatcttttctcctgatttgtggtaaattcattaaaaaaaattaattctttgactataataacttcccggcagtgtggtaaacttactgtctgtccacttgttttagaaaggccagtatcacactgggtaaaattggcatttttttttccaaaatggggagtcctttatttcctgagagaagacaggaaaagtgagtcctggcctgcccctcttgtctgggtaaccaggtactctgacttcgaaagaa

SEQ ID NO: 51137 - DNA, 322 bp, Mus musculus
  source 1..322: mol_type = other DNA
agaaagtggctaagtactttctctatttaatgtaagctgacttatttagaggttgtgggagatgccacaaatctaccatcttctttggaagtgagttcaaattaaaatcttttctcctgatttgtggtaaattcattaaaaaaaattaattctttgactataataacttcccggcagtgtggtaaacttactgtctgtccacttgttttagaaaggccagtatcacactgggtaaaattggcatttttttttccaaaatggggagtcctttatttcctgagagaagacaggaaaagtgagtcctggcctgcccctcttgtct

SEQ ID NO: 51138 - DNA, 412 bp, Mus musculus
  source 1..412: mol_type = other DNA
catccctcatcaaagtcgctctcatggtgagaggggtgtcccccgaccggtgggtgcggagtgctgtccgacacgtacaggtccgcatccccctgagaatatatttggccctggaccacgtgcagaaggagccactcctccgggacgtcgtcgtctcacctgggagcgcgcctccagggcgctggggcactcaactcggggactccctcatctgcagtgacaggcgtgacccgaggtgctcgtccacgcagaccaagattcgtgcacctgggtcccgggaaccgacggaggcccctgggggcgaatagcgaggtcgccaacccccacccgcagcacccgggctcagcctggaactcgccccagcaggctctcgcgagaatagagcacccccgtaaccatagcgacgcggctg

SEQ ID NO: 51139 - DNA, 345 bp, Mus musculus
  source 1..345: mol_type = other DNA
gaccacctgtccattgagcaggagtcaatatagtcaccaccttggtggagaacaagaaggaggaagacaccactgttgcctcataggttaaccctgtgtaacactgaggaggcaacacttgattaaatgtacactaagttttctaattactaaattacttcccaaaaaaattcctggtttaagacaaaggccactcacgcgcggctctgggggcgcgggaggagaaggctggaccgggcgcggctcggccctccgccatccggccctcaagggagcttgtcgcaagctgcaatccctcagccgcgtcgctatggttacgggggtgctctattctcgcgagagcct

SEQ ID NO: 51140 - DNA, 540 bp, Mus musculus
  source 1..540: mol_type = other DNA
ttcccgtggccatgggggccactacgccaaggtcacatgagccaagagcgccttccttcatttacagaccgcggctgtggagaccccgggtagggaccctcagcacacggcggcgtggtggcgaccccgggccgccgactgaggacccccggctgacgcgcagcggaggaggggagggggcgggaccgcggcggggcggggcggcgcggagccgcggctgacgcggagggccgggccgggggcgcagggaaggggcggcagcgagctcgccaggcggccaggaacccgggtggggccgggaccgaggcggtggctggccagcggagctcaggccgggcgcggcgcgccgggtgaaggcggcaaggcggcaaggccccggccgaggccggcggagccgcgcagctgcggccggctgacgtgagcggcgtgcgggtcccggccggcagcgcgctggcggccatggcggtggcgctggcgggccgcggggcgcgcggcggcaggggccggcccccgggcgggcgggcggagggggcggggccg

SEQ ID NO: 51141 - DNA, 298 bp, Mus musculus
  source 1..298: mol_type = other DNA
acaaatttttaatgttacagtaaccattttgagttacaatgctattgatatcacaaatttctttgagttcaaacccaaggttacaatgacagctgttaatatgctttctggttaccataatagctctatgcgtagaacagtgcttacctttattataccgcagttccaaaaaatcagagatcactatcgcgtgacagtattgcgctgcgggcctgccaggacgggctcctggaacgggatgggacgcagcgctccgccctacctccatccctccttcccggcttccgggatgcggcgc

SEQ ID NO: 51142 - DNA, 345 bp, Mus musculus
  source 1..345: mol_type = other DNA
accattttgagttacaatgctattgatatcacaaatttctttgagttcaaacccaaggttacaatgacagctgttaatatgctttctggttaccataatagctctatgcgtagaacagtgcttacctttattataccgcagttccaaaaaatcagagatcactatcgcgtgacagtattgcgctgcgggcctgccaggacgggctcctggaacgggatgggacgcagcgctccgccctacctccatccctccttcccggcttccgggatgcggcgctctcttccccggcttccgggacgcggctgcacgcggcgtaggcgcgagccctgtgctccgcggcatctg

SEQ ID NO: 51143 - DNA, 440 bp, Mus musculus
  source 1..440: mol_type = other DNA
aacactattttgcaaccttgtgcaaaatgttttccctcatactgaaatgatctttttcactggtatcagagaaatcactaactatcttaaatttttccttatatagtcttcaaataacaaactaatattctttaaaactaaaagcacttcactgatcagcacatgcgcgcgcgcatataactcactagaggttggtaagttacatatatactaaaattgcatttgtaaggtgtaatacaactacttgataattctggacatttgcaagtctgaaaagtaaaaatccttggatttaacaacaaggcgggcagccgtcctgggctcctgcccaacggccctgctcagatgccgcggagcacagggctcgcgcctacgccgcgtgcagccgcgtcccggaagccggggaagagagcgccgcatcccggaagccgggaaggagg

SEQ ID NO: 51144 - DNA, 298 bp, Mus musculus; identical to SEQ ID NO: 51141
  source 1..298: mol_type = other DNA

SEQ ID NO: 51145 - DNA, 202 bp, Mus musculus
  source 1..202: mol_type = other DNA
tggatgatacaattaatgtttattttgtaagaatactacagtgacttctctgtagactacagtagatactttctgtctgccttactgagagaagagctggattagacagtaagatgactaatctagctgattgagctctcctttattttacaaattaaggtggggagcagccccccatagtctggcagaggcaggctttggc

SEQ ID NO: 51146 - DNA, 380 bp, Mus musculus
  source 1..380: mol_type = other DNA
gaaaacatcacatgtatgagctgacacctctcagtgtggggacatcctgatgtcactgccctcagacacgtgagtcaggtaacagattttaaaagacctgtttggaaacagctgtagcaaatgtgattacataatagggtcacctgcctctctgaggaggaaagtcagagcagacattagagtctaatgtcaatcatgacgtcatatgtccacaatgccttgattagactcactggaccagggtatcgtttggtcctctgggccagcggcgacacaaatctggcttcgcacgtgctcaggtcgtttgacaggtctggatcacgaggaactgtccagcctgacaggcagcccacacatgcagcctcactgcgcatgctcgg

SEQ ID NO: 51147 - DNA, 519 bp, Mus musculus
  source 1..519: mol_type = other DNA
ggagggaggctgcctcttgcctgaggggtcatgttgcaaacatgcacaggcccagcaaaggtttgaactgttcctcagctgaacatgggaagtacttcattgcaaatatgcggcctgtaaccattttacaaatattttctagaaagtgattcaatatttatgacagttgaaaacatttttctgcctctcaggtgctgagctgtgagagaagcctcaggatgtggcctgtgccgcctttggtcaggaagcaggcaggtgcgtgccatctgggctgctgcctaccggttgcacatgtcacctgggttgtgttccttatagagagctgttagaaagcctttggaaaggggttgaacacaggctgtagtagggctaatctagaagccaccaagttttagatgaaggttactgtgcattaaacataattttgtattaccaataatgagggagttttaattattggaatatacctttaacttcttcagattggaaggaaattctgaagcatgtgcctgcaactct

SEQ ID NO: 51148 - DNA, 290 bp, Mus musculus
  source 1..290: mol_type = other DNA
agcacccaacagaaaccaatgggctttgctacctctggcagctgaggacgcatcctggagctgtaaagctaaaggcaaacagctaaaactgtaatcttgagatccaaatgtttccagcaccccaagttgggggctacttggagatttccatccagtactggtactcctaagggcctcgcagcttcccatactctgcgtggtttgtgcgtgcattaccggagcaaggcacccagtgctagtgcaggctgccactcagcctgaagactttattccccggttgctaggcaacg

SEQ ID NO: 51149 - DNA, 330 bp, Mus musculus
  source 1..330: mol_type = other DNA
attatcaacgaggtaatgagctcctttaggtgttgtataggttgtctatttacacagactctaataagtacaatagtactgtgtatctattttcccctaaaggaaacattttctcttgaaagtacaccagggggaagcatgccaactggattgcatccagaaacataaatagataaatgttagttcgcttcttctttagtcatagacgcatccatgggttttacctacatgatgctaagttctgtgaaattaacaatattaaccatcatattctggctccacttcgccaatgtgacatccaatccaaacgttttcttagggttataaaac

SEQ ID NO: 51150 - DNA, 309 bp, Mus musculus
  source 1..309: mol_type = other DNA
tgtactttcaagagaaaatgtttcctttaggggaaaatagatacacagtactattgtacttattagagtctgtgtaaatagacaacctatacaacacctaaaggagctcattacctcgttgataattaatgaatctgtgactacaaagtcgcttttttgttacgtaagttaacatctactgagaacatgatgaggagcgcttgccaagcaatctctggagttcgaagccagccagttctacagagaaactctttctcactagaaagggccgtcggaggccccgccccggaactgctggtacccggcccg

SEQ ID NO: 51151 - DNA, 359 bp, Mus musculus
  source 1..359: mol_type = other DNA
acagagcctccctttgaaaaaaatagcaaacttcaacattaattatgattggcgacattacttaggatgtattcagtttcataaaactaagataagagaataagaaactctctgttctgagataacagaataactttctcttccaaaggaagcttagcaagttccatttgctagagaaactgtcataataaaaatctgaaaattcagcttctgtggaaaaacctcttttgaagcagagattttaaaagaccactctaagataatcacaaagattatgacaatatctaacggcataaattcagaggtctgaagagcttccggccttcggatcccagtccggtcccagctcgagatctgac

SEQ ID NO: 51152 - DNA, 490 bp, Mus musculus
  source 1..490: mol_type = other DNA
tatactgtctttaaagaatcttttatttgcaggccaggtaatgaaatcagaaagaattttgatttaaaaacaagttgcggatacagtaatgacagtaactgtcaactaagctgcagcattttatgaaccaggcatgcccgcccgggaggagacttagtcgctggtcgcccaggccgggtgacgcagcagctccgaccggactccggacacccggcgcgcgcggccggcccccaccgcaggcagtcctgggcccccgctctggatccctgcgcatccgtgccgtgaccagagcgcccatccccgggagccccacgaacgccaggggtagcgccggttaggccgagcctgggctggactcggtggctttccccgaggggcgtgcaccacctcggcgccccgccccgccccgccccgcccccgcgcgtcggcggaaaggccgggcgtgcgcgccgccgccgcgcgccgggaaggggagtgaaccggtgacgtc

SEQ ID NO: 51153 - DNA, 211 bp, Mus musculus
  source 1..211: mol_type = other DNA
cattggattaatttaatagaacgcagctgccagcgaattccgctgggagctcgcaggtaccttctcagtccaccccctcggtgtcatctgagcgcttcctggtcgcccatttctattgggtaccagaaaaccgtgaggctgagccttgaagaagctgccccacccgcgggcggcggacacggaacttgagtgagacgcgagggcggctcca

SEQ ID NO: 51154 - DNA, 346 bp, Mus musculus
  source 1..346: mol_type = other DNA
atgtattcgttacgttacgttttattcctatacatattatgatatatactgaaaatttggcactttcctactgaggaatagacaatagaatagtagattatagaataaagctccagctggaaagtttgtgcaatgaagccacaatacaaaacgttgtttcttaaagtcactctttaactagcagttttccactagcaataagaggaagcaccttctgagggcagtggactcacaggtcagaatttgagtcctggctctggagaacaaagtcacagctcatgatctagaataggtgtgcgtcctctcaccctgagagagttgctcctgtcactcaggatttactagc

SEQ ID NO: 51155 - DNA, 352 bp, Mus musculus
  source 1..352: mol_type = other DNA
acgttttattcctatactattatgatatatactgaaaatattttattttttggcactttcctactgaggaatagaaaatagaatagtagttatatagctccagctggaaagtttgtgcaatccacaatacaaaacgttgtttcttaaagtcactctttaattagcagttaaatttttcagtccactgcaactttagtaatatgcttcattccactagcaataagaggaagcaccttctgagcagtggactcacaggcaagaatttgagtcctggctcttgagatacatatctctgctgatccctctcaccctgagagagttgctcctgtcactcaagatttactggccaatc

SEQ ID NO: 51156 - DNA, 395 bp, Mus musculus
  source 1..395: mol_type = other DNA
ttttcacatgttctaatgttaatgtagaaagaaaaattccattgtgtacaacggtcttaattagttaagtcctaattagatatgcctagaatcctgtattcaagcatacaacatagagatgaaaaaggattgatcttttgtttcgattgagcttactccaggaagaatacattgtttctgtccttaaagaagcttaacctaagttcgtgaaatgagaaacacaggtactgaatatcacatgagtcacacttgttactcctggacccaagaaacattgaggtgcgcgctttctttggccgtcctgggatcagcgtcccaggccagcggggcagctcctaacccggccctcctccgccggacaggggtggggctgccgagagacaagtgcacagttg

SEQ ID NO: 51157 - DNA, 434 bp, Mus musculus
  source 1..434: mol_type = other DNA
gtccttaaagaagcttaacctaagttcgtgaaatgagaaacacaggtactgaatatcacatgagtcacacttgttactcctggacccaagaaacattgaggtgcgcgctttctttggccgtcctgggatcagcgtcccaggccagcggggcagctcctaacccggccctcctccgccggacaggggtggggctgccgagagacaagtgcacagttggcggaagtccggccttaaatactatgtaaaacatttgcaacttgccaaatcagtcaaacgtaaattatttatttaggggctgaaaaatcacttctgcctgatttttagctacaaaaacgagaaaaaaatagcatttttctactgcttcttgagtgttcttacctagcgataagcgcgcgtgcgcgggcaggtcgccgccgaaagcctgcgagattacc

SEQ ID NO: 51158 - DNA, 376 bp, Mus musculus
  source 1..376: mol_type = other DNA
gagaatgatagtagatagcttctatttgaaacagcatctttcagagaatatgaagctacccatttttgccaaattgacctgtacatgcagccatgtatatgcaaccatgtcctgctttcacttacatgccaggaatttgaactaagttctcttgctttcacaagagtcctgacaatctcaccattaaatttttaacagaataaattatgagagaatgatatcaggattaattaaagtcaatcaccagaagtgactgtcattgattctgatttcagaaataatgcatttgttcctctttcccaaaggggaatgagaagaaatctgttctcatgatgagttaacagaacgaagccatgggaaccagcctgtcagccag

SEQ ID NO: 51159 - DNA, 416 bp, Mus musculus
  source 1..416: mol_type = other DNA
gagaatgatagtagatagcttctatttgaaacagcatctttcagagaatatgaagctacccatttttgccaaattgacctgtacatgcagccatgtatatgcaaccatgtcctgctttcacttacatgccaggaatttgaactaagttctcttgctttcacaagagtcctgacaatctcaccattaaatttttaacagaataaattatgagagaatgatatcaggattaattaaagtcaatcaccagaagtgactgtcattgattctgatttcagaaataatgcatttgttcctctttcccaaaggggaatgagaagaaatctgttctcatgatgagttaacagaacgaagccatgggaaccagcctgtcagccagcctttcaggctaattagctttagtaatccactgcatcaat

SEQ ID NO: 51160 - DNA, 403 bp, Mus musculus
  source 1..403: mol_type = other DNA
catatctgaagatctgtttcttcatttgtgtataaatctgaggaaataccagtaggactgaattactttaaatttatggccccctcccttacaaaaaagggggaagctataaagggtctataatgctcccctaaaacatatagacctatgtgtgagtacctgttgaaattcattttgacaactaaataaaaagaatagtgtcattttatagacctgggcatttataaagtatccagaataggtcttcttataagaggaaaagtcacttagcctgtgatgaggcaatttttttaaattatttttttcttaaaactccttctaagtactatgaagagtaaggtatttaaatgatatataatcacgtctcgggtcaggagggaggacccagggagtccagcttctc

SEQ ID NO: 51161 - DNA, 625 bp, Mus musculus
  source 1..625: mol_type = other DNA
tctacgtgtctcgtaggctgccggggaccgccccgatttggcaccggaaacaatggggcccgaggcatccctccggtctagccccgcggaatcaggccaggcaggcgggcctctctgcacacaacctctgcgcgcacggtccgttctcctacaccccgctccgggttttgagatctgctcgcagttctaagcccagccctaagcaaagggcaccgatcgaccctccggctttgctgcagcagcagctgctgcagggcgttctgctaaaggcgggccgaccaccgccgcagggcttgctccggcggttaagaagagcgccgccccgggctagcccagcgtagaggccgacccaccctgggccttgtcttgctttcagaacgcgaaggccgcatttccgggctcagtactggggtggccgcacccgaaacacggcctgtctgaaccggggtactacagctctgcggcacagacgcggcgagtgagctccgggggtggggctctaagccccgccccagcactgcgctcctccccgccgcccctgggcggagtgggcctagggttgagtgttgttgccgtgcggcggagcggcgccgcccctcgccgcacctccccggcagccctcgga

SEQ ID NO: 51162 - DNA, 226 bp, Mus musculus
  source 1..226: mol_type = other DNA
cccggacagtctgcggctgggtctgattcctccatcagaccgtgagctccgtgtgcaagggcagataggaggagggaaggagggagtctgcctccactgcctcccggccccctggactcgggccagcttcggggcagggagccaggccggactgggctggaggggccgggcaggggccccctggggagggggccggtccgaggccacgctgcccgcggggtctagg

SEQ ID NO: 51163 - DNA, 198 bp, Mus musculus
  source 1..198: mol_type = other DNA
gccccagaagaccagttctgtgctcagagcctcagggtgggtgcaggtcctagggctcctcccaccttatcgaaggcctttagcctgggatatgaaacctttagatcctttctgcagtgcagaagtcaggtctctagtgggagggagggctgtgaccactaccccttagtctaggaggagggggccgggggcccggac

SEQ ID NO: 51164 - DNA, 332 bp, Mus musculus
  source 1..332: mol_type = other DNA
gtgggagggagggctgtgaccactaccccttagtctaggaggagggggccgggggcccggactcctgggtcctggcacccacccgtaggccttcgccgcacacaagctcgtgtctgtgggtccgtgtcgggggctcaccatcgcggctgggacctccccggcccccacctgccgcgccccccgggctgaggtaggagggctttccccaggctgcgccctgcactggaaggggccggcggggaccccaggtccacaccattgcccgggttctagaagctgaaaagggtgggtccctgagaccctttaacctgtgaggacgtccagggtcacag

SEQ ID NO: 51165 - DNA, 369 bp, Mus musculus
  source 1..369: mol_type = other DNA
catgcaccttaggaacctctagagtatagggttccctgcctataatatcttatggaggtgctttaggtaggtccctctgtccttgtggtaaggaattagttccaaactcaaaacaaacaggcctggtggttcaggcttgtcatcctgactcctggaggtgtggctcagtgacaggtcccctgtgtatggcttagtggtatagactacttacctaaaattcccagctaccatgcataaatccataggttttgttcccagtggctagaacacaaaacaccacatttatgttgtagactggctcaactggccacactgcagaaaagactgggtctgtgagacttcagggggagccctccactcctggtctca

SEQ ID NO: 51166 - DNA, 300 bp, Mus musculus
  source 1..300: mol_type = other DNA
gtatttgtacagatactgtgtgatcaccatggacctttgctatataaaaatgatacactccaataagatcactgatttaccaagttggatgtgacattgggaactttctaaaaggtgtttgttatgaaaaatcacaaagatatgttgaatggctgaccatctctgactgtctgaaaaggaggttacacctctgtatcccacgctcagattctccagtttgctgttaagaaaaaaaaatttgatttggatatactctcagggtccttgtaaatcacagaaaaccattgtttcttgtttact

SEQ ID NO: 51167 - DNA, 353 bp, Mus musculus
  source 1..353: mol_type = other DNA
agagagagattgagaataaactttatcagaatcactccttgaagctaaaaaaaaaaatgtatatatatccttataagaaaccatgtacaagagtgataaggatcactagacaagctctgttctgatctagtctccatcagagcaatgaactcaggtcactccatggagtatgagcatgtgtgtacatatgtacccctacacagacacagacacacacattctggctgtagctccagtctgctgtgaagcaacacaggcacacccacagacgtgagtgtgtgtgtactttttactgaaatgtgatcctgagggacataactgcctgacctcagagcccctggtcagacttgtcc

SEQ ID NO: 51168 - DNA, 366 bp, Mus musculus
  source 1..366: mol_type = other DNA
gccaggagcagatatattgagacatctatgtaggtaaccatcttcatgttttaaaagcataaaaattattcttaaatgtatgagtgttttatctttattctggcaagccaccatgtggattactggaatcaaactcaactccttctcaattttttaaagagtgaagagtctgggtgttgacaactgtttgtaaatggtggaagaatagttacacttttgtttctagcttagaatttaagagcactggctgttcttccagaaatctaggttcaggcatgcatgtcatatccactatgaaaaatggttccaatagcatcgcatttgcctgggttctgggaatcttaggaaattttgacagaagtctgt

SEQ ID NO: 51169 - DNA, 491 bp, Mus musculus
  source 1..491: mol_type = other DNA
ttagtcactgagacgtctatgtaggtacccatcttcatgttgtaaaagcagaaaaatctttcttaaatgtatgaatgttttaactggtacctgcagaggccagaagacacatcctctggaagagcattcagtgcaactccttccaattttttgaaaaagagtgaaaggtttaggtataccatgtcagactgttcacaacattttgtaaagtttccacagataaatggtagaagaacatttacactatgattatatttaagagcactggctgttcttccagaaatctaggtgtaactccagttcctagggatccagtgttatcttttggcttctgaggacaccagacatgtatgttatacacacacaactttaagaaaaatgtccatataaaataaaaggattccaatagcatcccatttgcctggcttctgggaatcttaggaaaccaagagtttctacaacaaggttggtttcagttttcttggctatag

SEQ ID NO: 51170 - DNA, 577 bp, Mus musculus
  source 1..577: mol_type = other DNA
taatggtattctcaatcacataaatatgtgtttttattatggatttatcattctcataagaatattgtacattcagtttattttttacttaatattctcacttggaaattttccatatctatgtgtattatataaattattatgagacttagatctttaaatgttttactatataatacatggtgcattcggtgagaacaaagaaatacatgcattattttggagaaaagttttttattttgtttaaatttcagatgagaaatgcatagatttcttttttctctttattgtttttcttttttttcataagagggtaattaacatcactttattttcaatataagttgtaactggaagttcatttgtgaatttagcaatgagtatccttagacttactcttagtactgatatttctattcgaaggtctggaagtatttttcataaatatatagattggaaaatttcagcaatgttactgacaaatatttttgtcaaatatttctgacaaaatgattttctgagtcagaattctaagttcaaggacaaattgctaaagtacagtgttcttatttcagag

SEQ ID NO: 51171 - DNA, 291 bp, Mus musculus
  source 1..291: mol_type = other DNA
caattttctctctaattggagaggaacctttcatattttcaaccttaaggagaaaggattgcattatgaggcagaggtccatcaacggcaggatgaaggcaaatctccctacttaggagtccctcctttacagagaccggtatagcagaaccagacaagttcccgtggttgctagcagcgacgtaggcgggcacaagggacttggttggttcagaccaaacagacgcgagcttgtgcggcaatggcggcgggacggcccctgtagggcggctcgggcgcccccacgtccgc

SEQ ID NO: 51172 - DNA, 415 bp, Mus musculus
  source 1..415: mol_type = other DNA
gaaatatttttatctgcagactgctgtcacaaacatcctttagaacacatgtacttgtatgcaagagtttgtttctatttaaagtagatacagtaagaactttcaatgagaatgccaaatagcttatatgctgtttcaaactttcaagccaaaaagcacttaaaatatttttaaattgttatttttattacaaagagaaaagttggcacttaaaaaaagaatcgatcttcaatgccaatcgttcatgacctttgtgaatgcaattctcttttgtaacagaaaatataacttttaaaataggtaattgtttttatatataaaactcttcgaattaaaaataaaatcaatgcttgctttactgattgacaatgctcaggagccctgctccttagagctaggcactcctgcgcagcga

SEQ ID NO: 51173 - DNA, 222 bp, Mus musculus
  source 1..222: mol_type = other DNA
agttcacagtgtgatcaaatatcctgcaacacttggacaatatctgaggggaaaagtggatccaccagaaatctgttagacaaacttgtttctgaatcagtactgaaagcagtacatcgcgggatgaattcagctcgggactagcttttcaaaatctaagatactaaggcaaaaatgccttaaggaatgtcttccacggggacgggcggggccgctcacccg

SEQ ID NO: 51174 - DNA, 484 bp, Mus musculus
  source 1..484: mol_type = other DNA
catagcactctgaaaagcagctcaggagtaaacagcagcctaggtcctgtgacctgcctgtcacagtctgtggctcagagcactctgttctttctggacccagggagcacagagcttctggtccccaccttaatgtctaaagtgagccctacactcagtatggacttggttttctatacaccatgtcaacccctgtgtgggagagggtgtttgcatgtgtatgcatacccccttgtgtgcctaggtgtacatgcatatccctatgattcaaattcaagtcctcaccttgggagggaagtgctctgcctaaaaagtgcagccctgtctcatttctgaggaattatgagacttccctgatttcttggtttagaaaaacagcttagtcttgaaagttaaactggagcatcagcttgtcataacaggtcctattatgacctcatgaggagagattttgaggctctctaggcaacagatgttaagctgt

SEQ ID NO: 51175 - DNA, 300 bp, Mus musculus
  source 1..300: mol_type = other DNA
cttgacaaaaactggcgagaggggcaacagcacatttgaagagttttgttatactgctactcaattgaatgaattaaatgtaatggatttaattttgcgattactgtagttttttacagtggtctctgtagtagagaaaagtttctctgttttatctcaaagcacttttatcttgagtcacagaagacaaactttcaaaatccaagttctttaaatgtaagtcaaattttcacagtacgctgacagcaaacttgtggggagtctgggacctgtctccgggggggtggggccactcaccgg

SEQ ID NO: 51176 - DNA, 326 bp, Mus musculus
  source 1..326: mol_type = other DNA
tctttggtgttcaccaagctagatgaactaactagtaactgactatatagaaagaaagaaagaaagaattggtttttctcactttaagcataaatcacaagactaactccttacagcacaggatgaattcggccctgggcggatagcttcttttcaaattccaagttctttaaaagtctctcccaagtcaaaattttaggatttgcttttgccagcggctggaagtccaggaggtgttggtctaccagatccacttctggtctagctagcagcaagggcgagctgacagctggcgggtctccgcggggcagggccactcacccgga

SEQ ID NO: 51177 - DNA, 586 bp, Mus musculus
  source 1..586: mol_type = other DNA
gaaaaggcctttgatgttttaaatggagcctttaatattacaaagtctgggtcatcaaaacagtaatcttcattatggtacattagtttacccaagtattgtgaatctgagtgcattaaattcttcttcatcaatttctgagaaaaaatatttaaaaacagaaacatgtactctgcctaaagctgattactgatttcaattatttgtcttggtttttctgaaaatccatgcaattatagtataagaaatgtacataaagttaagaaacttgcaaaagcttttaatgaagtttaaatcttaaaacaccgcaatttatattaaactaaaattatgaactggggaccactgatgtggttcatagacatcatagtaggatttttctttattttaaaacgaagactatgttccaaaattgcagtatatggttttgagtattttggtatatattatatggcccagaggctcatagtgttcagaactcactatgggggtcagataccgggatgctgcgtcatatcagatccagttctggtccaggggtcagccttacagctggatctttccgtggggcggagccactcacccg

SEQ ID NO: 51178 - DNA, 275 bp, Mus musculus
  source 1..275: mol_type = other DNA
gaagtatgaattcagtcctgacttatttcacattgtttctgtaatatgccagttagtcattgacacagaaaaataatttgactcctgaagttggttaatcttaagaactttgaaaattatagaactgctctgtctggcttccaaaactgctggaccccaacaccaaatcaaaattgaagtatttggttttggctgttttgcatctgaaagattcagaataccagatattctggtcgtgggaggggccggtctccgctgggcgggcccactcgccc

SEQ ID NO: 51179 - DNA, 459 bp, Mus musculus
  source 1..459: mol_type = other DNA
ttttctgtgtcagtgactggcaggcatgttacagcaacaatctgaaatagcatcctcaacaagaagacacatttttttttctttttcagacagtgtctcacccactatgagtgtcaccaagcctggcgccactgatggaaaattaatagtagatagacagtttacttttaaaacttaatttttacatccatactacaatcaaattcatttaagtttgcaggagttcctatccaccacatgccactttcttaaatagagaagtgattgtaaatttcaatagctttgtcctttgtcatagcaagttttcaaatattaactgataaattcaaatattctactagatcagccagaaggtcaataaaaagaaatagtattattccagttaatattactgaaaatttatcttatgatcagaggggaaattgatcccgctcctcctcggacctggaaggttcgagc

SEQ ID NO: 51180 - DNA, 297 bp, Mus musculus
  source 1..297: mol_type = other DNA
gttatagagtaacagacttttttatgactagaaccatctgtcatgagaaaagagcctcgtgatgcctttctacagtgcgggatgacttcagccctaagacacctttctttttttttttcaaaatccaagttctttgaatgtctgtaccatagtcaaattttcagaatttggtatacccaggatggggatcagataccggggcgtcctattaggcccagttctggtctaggcagacagtggccactgggagggcagcctgacagctggagctgtatggcaggaagcaggagtattccc

SEQ ID NO: 51181 - DNA, 328 bp, Mus musculus
  source 1..328: mol_type = other DNA
ttctagaatctatgaatctatccatagtcaacatctgagaggcctacactgactgtggtcttgtgtgaggccagtgcagtagagagtctctgcacccatcactctattaaaaacagaaggaagaaattctatattttctctcaaaggactttaagtatgagtcatagaaggctaagtacattctgccttgggctggtagcctaagtcagaatttcagggttcaaaactcactgtgtgtgtcaaacattgggtgcatctaggctggcagcaagcatgaggggagactgttcagcctgacatctggagctgtgtggaaggcagcttgaca

SEQ ID NO: 51182 - DNA, 401 bp, Mus musculus
  source 1..401: mol_type = other DNA
ggtatgtgacaaatcctttatcgctcatcagagttcatactggagagagacctcacagatgtaaggtgtgtgacagatattttgcaaagggttcaactcttgcaatgattgtgatataccctttatcttacaagtcttagaagacatcagagagttcagattaaagagaccttacatctgtaaagaatgtcacttctaaataatgtgccagagcatttatccggtctatagtataaataatataaacataaatatctggacatggtggtatagaactttaatcccagcacttgggagacagtgccaattggctgcgcagagaatgtgcagagcagcctggcgtgtgtggaaggcagcctgagacgatttgaaccagtggcggctccagtggccgcaggagg

SEQ ID NO: 51183 - DNA, 225 bp, Mus musculus
  source 1..225: mol_type = other DNA
cagtaatgggaatgacaaggttttcccatgaagaacagtgtcctttcaatgtctgtaaagaaattgatgcctgccaatgtgctgtcagaaagcctttaaagaaatatagcctatgtttactgatctgtaggccaggctggccttgaactcaggcctggctctgccttctgagtgctgagattttacaggcttgcaatgaacagtctctagaactgttggcaattg

SEQ ID NO: 51184 - DNA, 340 bp, Mus musculus
  source 1..340: mol_type = other DNA
caaactactattgtttctctgtatagccctggctgtcctggactcactttgtagaccaggctggcctcgaactcagaaatccgcctgcctgtgctgtggagctccccagagagcttgcagagcacccttgacacatactttggaagggagccaaactttgtgactcatatttagttttgtgtgaatgaaacataagaaattgtattccaacctaagaagttaggctgccaatctattatctgggtttcaaagctcatcagatgtcagaatgcagcttcctatggaaccagttttagagcaggtccacagctggagctgtgtaaatgtttaggggaaccac

SEQ ID NO: 51185 - DNA, 524 bp, Mus musculus
  source 1..524: mol_type = other DNA
ttctaatcataacaatagagttgaagacgcacttctgaatgctttatttacatccgaaactgcatacaacactaaagtctacttagtaaatattaatgtttacaatcacaaccatagcataacataaagtatattttctcgttcaaaaaaaaaaagaatctgtactggttcttcatatggttagtataaatacaaagttctatttagcgaagtaaaaggtattctcttgaataagcaattagtaaaacacgggtgttagaaacatgaattacgtcccgtatgctttgtgattgacacaatagcaaacagcagataatgcaactgctctatcatttttaatgagttattttacaactgaatattctgataacagccccgcagcgcctctgacctgggaccttccggggccaccgggctgcggtgcccgccgctgcgctgctgactctcccaggtccgcagccaggaaactgcgtctgggagctttccggtttccggagcctgaaggcgttagcgctgtcacgtga

SEQ ID NO: 51186 - DNA, 308 bp, Mus musculus
  source 1..308: mol_type = other DNA
tcagactatttataggaaaatatttgtgcaaactatttgcattatctattttcactggagctccccagagagcttgcagagcaccctacatgctttagttggggtgcaacataagaaattggaatttatctcttaaactctccaggagggcatggccaaactcttttgtatacttgaaagaaagaaagaaagaaaggaatttagggtcttggttagccgaggaggctagtgtcccaagctaagaagttaggctgcctgtttattatctgagggtttcagaactcactctcagatgtcagagtgcagca

SEQ ID NO: 51187 - DNA, 327 bp, Mus musculus
  source 1..327: mol_type = other DNA
ctggagctccccagagagcttgcagagcaccctctgctttgatacatggtttggaaggaaggttggggtgcaacataagaaattggaatttatctcttaaactaggagggcatggctaaactctattctatactttaaaaaaaaaaagaaaaggaatttaacgcctaggttatattttgctgtattgtagccgaggaggctagcgtcccaagctaagaagttgggctgcctatttattatctgagggtttcagaactacctctcagatgtcagagtgcacaggtgaagcgcttgctcacaaagtgtttgggggaaccacgtgggact

SEQ ID NO: 51188 - DNA, 444 bp, Mus musculus
  source 1..444: mol_type = other DNA
aaaatatctagtaaaaattaggcaatttaaaaaataaatcagcatatgaagacgcatttctgaatgctagacgaataattcatgggcaataaaaagtatgcttagtaaatagtaatgtttacaatcatagtaacacaaagtatattttctcgtaaaaagtgtgcactggttcttcatatgattactatatacacaaagttctacatagcagggtaaaacgtatcagttagaaaatatgaataaatttacattccgtaagctttgtgattgacacaatagcaaacagcagataatacaactggtctatcatttttaatgagttattttacgactgaatattctgttaaagccccgcagcgcctctgacctgggaccttccagggctgcgctgctgactctcccaggtccgcagccacgcctgaaggcgttagcgctgtcacgtga

SEQ ID NO: 51189 - DNA, 334 bp, Mus musculus
  source 1..334: mol_type = other DNA
tttaaaatatgcaaaaggagacaactttggctaggttttcccaggccataagccactctctcctgagtaggcaaatggctttgtaactgctgttaccagtactgcaaatgttctacgacactattttcggaaatcattctggtaaccaccccgcagctcctctgacctggaaggttccagggccgccgggctgcggtgcccccggctgcgcggctgatggctgacggagtagagacaacttggctccaacaggtacctaaggggacgcggttcccagtctgccacgatctttggagcggctccccttcacgtgacagcgctaacgccttcaggc

SEQ ID NO: 51190 - DNA, 231 bp, Mus musculus
  source 1..231: mol_type = other DNA
gcttgaaattttaaataatgcaaactcaccacattttatttatggttgctatgctatttacagagaaatattcgggaaaagtatttgcattcctagtctcaagccatttttacttacttttcgtttttaaaagctcagaaggcttgtatcttaacttcttagttaggctgcccatcttttatctttcagggcagcctggctgctggagctttgtagcaggctgcttgagac

SEQ ID NO: 51191 - DNA, 332 bp, Mus musculus
  source 1..332: mol_type = other DNA
gttgattttgtcaaagaacaaactctttgtttcattgattagttgtattgtttctatatttctatataattgatttcgtacaatagagttgtagcactgtacaactgaattctttaagacagagcctgagttttcaaaaaggactttctgtacttagcactaccacagtatcactatctagtgatgaaacaaagccagcctggcagctgcagctgtaacaagctgtctggagacctcttgagtgaaaggaaaagccaccttgcctttactacctggaggagccacgtggttcctaaccacgggccttttacccaagcctccggtttgtttgg

SEQ ID NO: 51192 - DNA, 251 bp, Mus musculus
  source 1..251: mol_type = other DNA
tttatatgttgtaaactcatggcataatcttatatcaaaatttatattatgattgatagactatttacacaaaaatattcttgaaaaactattatctattctatctaacattatctattctctttgtcatacagcttgtatttcaagctaaaaagtgaggctgcctatctattatctgagaggactatcagatattagggtgcatccgcacccgggtatggtgggcggccaggagtgacaggaaaatcctc

SEQ ID NO: 51193 - DNA, 194 bp, Mus musculus
  source 1..194: mol_type = other DNA
tatctttaagataccacttacagtgttttccttaaaggacacagctatagttttttaaccttaggtttactgactagatccagttctggtctagctgtaggagcgtgtgcagcgcagcctgacagctagagctgtgtgacaggctgtcaggagggacctgcctccgcggagcggggatactcgcctttttaaaa

SEQ ID NO: 51194 - DNA, 241 bp, Mus musculus
  source 1..241: mol_type = other DNA
gtgtctcatctgctgagaccagcaggttccaaagatgatcctgattaatcatgatgggtcacaaaacaatgcactacttattaaattcagtttgcatattctatattgtattttgagtttattaacatactttacaaactttagaataacatatctgatgggatcagaacccatgttgatttgatccaattctggtcaagcctggcaccaggtctggcagctggagctgtgtggcaggctg

SEQ ID NO: 51195 - DNA, 459 bp, Mus musculus
  source 1..459: mol_type = other DNA
tcgcagcctgatgtgcaagcaatcaattacagaaggaaatatctagaatccagaggcttgtggcagcaagaactgaagcctgtctcaaaacagccctgcctgaagctgcagggacaatcagctttgatcaataggtcagtccggctggctgtttgactaacagttcttttgctcaaggcaaattgtctattttataggaaagtatgtttacaatataaaggtaatttaccattaacaccaatagtgactttaacaaactaccgggcagaggtgggcctcctgttcagtgtccctaggcatcaggactcctgttcctcagctcagtacagatgtagctgctgatacgccagctggtttcccagcgccccccgcgcgagcttcctgccccgggcgctgctggggaagcgccgagctcccgcgcggctctgggcggtgtgtcctgggggcgggaccggcgcg

SEQ ID NO: 51196 - DNA, 371 bp, Mus musculus
  source 1..371: mol_type = other DNA
tgtcttttaaaaaccatagtatcttcagatctctgagagttagaacaaatccatgatatcttatctagttcttcagagttctgtacaatgtagttgaactatctattatcgagcctaaatgattcttttaaaatccaattcctctcccatcttgtagacaggtaggcatcagggctcagggatggagcactctgccagtttgggagggtccaaagtgccgcaataatgctgctccgttatgatgactacagtgctgtctttgagtcacaaaacaccagaaattatgttttgtttttgagacacgaggctggcctcgaactcaagtaaaggcatgtgccacaaggctcagagcattggaaggaacttcctgt

SEQ ID NO: 51197 - DNA, 211 bp, Mus musculus
  source 1..211: mol_type = other DNA
ttagttcaagaccagcctggtcgtggtgagaccttgtctctgtgatggtttacacctgcagtgctatcttttccaggttcagctaaggctggattggtagaatgctttcctgccaagcaggtataaataagtaaataaataaatgtagtgagaatcaccagaatcctgctagtggctttagaggaggattccttccgggaatcagtggtgc

SEQ ID NO: 51198 - DNA, 246 bp, Mus musculus
  source 1..246: mol_type = other DNA
cctgcttggcaggaaagcattctaccaatccagccttagctgaacctggaaaagatagcactgcaggtgtaaaccatcacagagacaaggtctcaccacgaccaggctggtcttgaactaacctgctgtttaataaacatgtagataaatatttgttgtatgaaacttaactctgaagcttggcaaagttagacccacccagactgggaggtgaagggtttccccttacctgaaagggatgggtca

SEQ ID NO: 51199 - DNA, 345 bp, Mus musculus
  source 1..345: mol_type = other DNA
tccacagctctgcagaagaatacaggataccaagttacatctgcagcttctacatcctgcccacgatgatgcaaatggagctcctcctgtggctccagtggagaggaggctctgcaggtcgcgcctgcaggcggatttctgagttcgaggccagcctggcctacaaaagggctagagtctagaggtgccagagctctgtgctcaaaacagtggaacaatggttcggggcaaccatactgcgcacagctgggcccggctaggagctcagacggccggcagcctggggtcccccggcagggcggcaggatgcgtggggggaggggagctccggccaccccgcccccg

SEQ ID NO: 51200 - DNA, 412 bp, Mus musculus
  source 1..412: mol_type = other DNA
accccagcacagcataggctgagtgtggggtgatggagccaggagcatctggaagctcaaggtcccctgttctttcctgtgacacatgagacccttacataactgtgggggttcaaatgagaatgccccctcctgtaggctcgtacatttggtgccaaagaggtaagctttgaaattttaaaagcccatgagaggtaagctctctgcctggtccccaaaataaatgctttcttttataggttgccttggtcatgatactttgtcatggcaatagaaaagtaattactataaaagggctttcttagttactaataattctttgagcctgtagatctgcacatacccagtaagaagcaagatggatctttaagaggatggatgtgacattcctttgacagtgcgggcaagcttg

SEQ ID NO: 51201 - DNA, 288 bp, Mus musculus
  source 1..288: mol_type = other DNA
tactgattttaattatttgtattttgtataagtccacaggggccagaggattggctcccctgtagctggaattaacaggcaattacaagctttggaacttgagtgctggcacccagctcaaaagctcagcgtttgtgggctttgcagcacactccagtataagttcaagacttacgagactgtatgaagacagaccctgggtttaactaactatatagcattggatgacatggaattcactaagtagcagagtcactattagatctcaagggcaccgcgagcggtgcg

SEQ ID NO: 51202 - DNA, 166 bp, Mus musculus
  source 1..166: mol_type = other DNA
ctccagtataagttcaagacttacgagactgtatgaagacagaccctgggtttaactaactatatagcattggatgacatggaattcactaagtagcagagtcactattagatctcaagggcaccgcgagcggtgcggcgcacgccggtaggcccgcccctcgcgc

SEQ ID NO: 51203 - DNA, 242 bp, Mus musculus
  source 1..242: mol_type = other DNA
gtgccacctcctaccaggtcctctagaaggccctcattctcctcagacaggaactgcttgtgcaaaggttccctggggtcactggcacagctcctctgagaagggagctgggaagagggtaaaccaggttcggctatacacaggttaccttggtttaggccgcgagttaccccagtggtggcccgtgggtcccgacttgggggacctcgctccgcgcgaggggcgggcctaccggcgtgcgc

SEQ ID NO: 51204 - DNA, 332 bp, Mus musculus
  source 1..332: mol_type = other DNA
ggctcatgggttagccagacactcaaacatatgtgtcacacacacacaaataaaaggtatctttcaaaaaagaaagtagcatttctatatatgcttgcagtactgtttactgataggctgagatgagacagaatgtttcaaattcgaggctactctgttttgcaaaagaatagacaaatctaatttatttgggcttaaaaagaggaaaaacccaactatgcagttatgtcttataactgattttgggtactcaagctgttggggcgggccgaggccagcgctccgccccggaaggcgggggcgggggcggagccgcagccctgagtctggct

SEQ ID NO: 51205 - DNA, 326 bp, Mus musculus
  source 1..326: mol_type = other DNA
tgactgtcctgaaactcactttgtagaccaggctggcctcgcgagtgctgagaccaggctaggcatgtgtcaccacgcctggccaagccctggctgtcctggaactctctctgaagaccaggctagcctctaactcagaaagagcagtgggtaagattgcctgctgccaagcctggcaatctgagttcgatccctggggcccacagacagggtgtcgtcgtcgtcgtcgtcgtccccccgccttaggtaacatacaagttgagtaaagtctcaagtcatagcccaggttactgaactcagcacagtgacgtcattgagactttaag

SEQ ID NO: 51206 - DNA, 328 bp, Mus musculus
  source 1..328: mol_type = other DNA
agccctggctgtcctggaactctctctgaagaccaggctagcctctaactcagaaagagcagtgggtaagattgcctgctgccaagcctggcaatctgagttcgatccctggggcccacagacagggtgtcgtcgtcgtcgtcgtcgtccccccgccttaggtaacatacaagttgagtaaagtctcaagtcatagcccaggttactgaactcagcacagtgacgtcattgagactttaagtggtggcggccacctgcggtggccacctaggcaggagagggttgcgtcgggagaagcgctcgggtcccctcggccccagactttggg

SEQ ID NO: 51207 - DNA, 362 bp, Mus musculus
  source 1..362: mol_type = other DNA
tggagagggacctgtctagggtcggactagaccgtagggcctggccttccttcccactgttgttcaggagcattttagagagattggctataaagcatgatttttcacttctagttgaaatcaataaaggtccctttctccatgaagtctgtgcagaccttctttaaagaaatttcagttgagcacaaggttctgagctaatacaagtggcaactccttgaggagtctgcgcagtgagagcgctccggcaaacttcggaggcggggagacctcggtgcgcacgcaagacgcgaggcggggccaatgccccgggcgctagacccgctgcaccaggcgggggcgggaccacgggcgagcctggg

SEQ ID NO: 51208 - DNA, 124 bp, Mus musculus
  source 1..124: mol_type = other DNA
aaccgagtctctgatccaaataggttaatgagctgggcgccaggcacctgttgtctgggaaactgtaggcggggccccttccctaattccatttaccccaccgtctcaggctgagagctcctct

SEQ ID NO: 51209 - DNA, 350 bp, Mus musculus
  source 1..350: mol_type = other DNA
tcagtatagacttaaaataaaaggcctattttggtagaggctttagcaagttctttgcgcgaggaagaacctgaagcgccttcctcagagtagaagagaaccgaccttgcttcccttgcctttgcccgttccttgcctgtactgggcagggcgcctggccggaagggctgggcctggtcaccacacatcttagacggcctgcgctccagcagcaccttggacagagtctgcaaccttaggccactccagtggaggagcccgacgggcggagcatctccgtccgcagagcccattgggcgggggcgaggagccggggtggagcctgctgtcccctccggcgtccggccgcg

SEQ ID NO: 51210 - DNA, 325 bp, Mus musculus
  source 1..325: mol_type = other DNA
tctgcatgcatgcctgctgagagggctgccagtgagaagtgagagggctgcctcggctgcctcacaccttttttttttttaaaaagatttatttattttatgtatatgggtacactgtagccgaacagatgactgtgagccatcatatggttttattattatacataagtacactcactgtagctgatgccacagttggggaaatatgtgtccagcagttttgcaagtcttgcctctgggaggcacagagggtagctacctttgctatttacatctgcctccagcctctagggggtgctagagaactgtttccagagaactctcg

SEQ ID NO: 51211 - DNA, 391 bp, Mus musculus
  source 1..391: mol_type = other DNA
gagagggctgccagtgagaagtgagagggctgcctcggctgcctcacaccttttttttttttaaaaagatttatttattttatgtatatgggtacactgtagccgaacagatgactgtgagccatcatatggttttattattatacataagtacactcactgtagctgatgccacagttggggaaatatgtgtccagcagttttgcaagtcttgcctctgggaggcacagagggtagctacctttgctatttacatctgcctccagcctctagggggtgctagagaactgtttccagagaactctcggggaatgtctgctccagccataaaattcttctggaggggcctctcaggaagttgcccctccctcacaggaggcctgggaaggaa

SEQ ID NO: 51212 - DNA, 374 bp, Mus musculus
  source 1..374: mol_type = other DNA
ctacagtgtacttacatataataaataaataaatcttaaaaaaaaaaaagaatgttctttggaactggctcagttatgaagaccattgggctgcttccaaaggacccagccttgatatccagcacccacatggtggttcatatccaggagatcctatgccctcttttggcctccaccaaatacattttaaaaatacacttaaaatatgtcagagttatgttttttaaaaaataaaaaagaaaggaggcaggctgatctctgagtttgaggccagcctggtctatagagttcgctgtcatccttttagtgacggatgcagtagcgggaccatgggcgcctctgctgcgcatgctcgctagtaggcttcccaagca

SEQ ID NO: 51213 - DNA, 362 bp, Mus musculus
  source 1..362: mol_type = other DNA
atttatacgtgaagattatatataatatacaattatattataccatatataataatatatcttattagaacataataattttagaaacaaccaagactatgattgattgcaaatgacgtaattcatgaacccaaggacctgggataaagtcactgaattgtgccagggctatttcagcagtcagtgacttggaccaatgtcccttccctcggagggacagacaaaaacctttaaataagcattccagtttatgctttatttagtatttactggagtctcctcccgggtaatggacaggaatgggggccccctcatcctgcgcatgctcgccccgtgaccctagcttgaggtgacggcgggag

SEQ ID NO: 51214 - DNA, 228 bp, Mus musculus
  source 1..228: mol_type = other DNA
acttccacttatttagcaagtaaaaatacaataatattaacaatatgtttctgtggacaaatgaaggcaataatcctaacaatttccgaccccgcagcttggtgttcccgttcgcagagcggcgcccaggcagctggagcagctgtgcctttgttctgagtgcccgggccattcagctccggccggcggcgtggtccctgaggcgactgcgggagccctgggcttccg

SEQ ID NO: 51215 - DNA, 312 bp, Mus musculus
  source 1..312: mol_type = other DNA
gggcccttgctaccgagtgagaggcactgggacaaactcccggaaccgtgctatagggccaggaaatgataggcgaaaagtaatcacttagtctctttgcccaaaggtaagagaaagtattttaagaagcttcctgcgaagaggtcacagtgactaggtaaagctgctgagccactgccagggtgttgtgggttgcggcccccgcgcccctcccccctcccctttccccgcagtgcccgacgggactcgggggcccagcggctctcatgattgcgtgctgacgcactaggtcgtgctgacgcgcaacgctgc

SEQ ID NO: 51216 - DNA, 443 bp, Mus musculus
  source 1..443: mol_type = other DNA
ataggcgaaaagtaatcacttagtctctttgcccaaaggtaagagaaagtattttaagaagcttcctgcgaagaggtcacagtgactaggtaaagctgctgagccactgccagggtgttgtgggttgcggcccccgcgcccctcccccctcccctttccccgcagtgcccgacgggactcgggggcccagcggctctcatgattgcgtgctgacgcactaggtcgtgctgacgcgcaacgctgcccaggcggggtgcgagtggcgcagtcgaagcccgctgcggcccctgaggaagcgaggaggcggcggcggcggcggctgaggcgggcggaccgacgaggcggcggcttcaggctccgataagcagcagctgcggcgggacctccctgtttgacagtcggcggccggaggcggcggcggcgggtgctagagcgcggggaga

SEQ ID NO: 51217 - DNA, 357 bp, Mus musculus
  source 1..357: mol_type = other DNA
agatgtcacagctcatggacagtcaaatgatgggccatagtttaaacaaactccacagtcgacttgggaaagtcttcttatggccacattaagtaaacctatcaatgactattaacactttttagttgggaccaggtggccaagtctagctagagaagcatggctgaattggatttaacaaacccatcttagatccaaaattgtacatcgttgcatgtaacagttgcataggcataaatgcagataaaacactcatataaaattgttcatggcagatatgcatgagtagccggggggcggggcgggcggggccgcgcagagcacgctgggtcgcgcttgggctgccgggaaggggcg

SEQ ID NO: 51218 - DNA, 286 bp, Mus musculus
  source 1..286: mol_type = other DNA
ggaagaggcgctctagcagctccagttccagctcctcctccaagccaccccctggcgagaggaggtgagaaggggaccctgggtgaggttctgtacgggagaaggagtgccggactcctcccatcctcccacagaactgaggtgtcccaggccatatctgggaagtcagcctggtctcagagatctagctctaagtcttccggaacgccctgtggcctgcaggataaagtgcccgggaatggcgtgtgaggctcttcaccagctggccatacccagcgcctccatg

SEQ ID NO: 51219 - DNA, 419 bp, Mus musculus
  source 1..419: mol_type = other DNA
agacatcctcacaggcctgcatgcaggccaagctgatagagagaatgtccctcactgagattagctatcacagttatacaatgaacaaaggtccttactgagagaactaagtgttgttataaactttgaccatgaacatattacattctctgagttccataagaacttctaatcagttttggtatggatacccaactggctgtgaattcaaagctaataactgatgagccaggtgtctggtgatccccatacagtgtgtagggctcattgcattatagggctctaagctctgtctgtcctcaaatagggccagcctttgttcagtgcaggcctgctcatgagccctgagtgcgggctgagggccagggccttggtcctacagttgaccaagccgggaaacggtggccggctcctactcc

SEQ ID NO: 51220 - DNA, 284 bp, Mus musculus
  source 1..284: mol_type = other DNA
ggatgtggccctggaactgcaggtgtgtgctacaccagctagcgcggagctttgtgcatgcaggcaggtactcttgttttctttattttaaattataaatatattggtgaacataacaatcctttttgaaaggcccttctgcctagagctaggcccatggctgccctctggtggacagcgatggacacgaagggtcagggtctctgtgcccagggacagtggacatgtgaggcctctcccaaggctgcagggcaggtgtggaggctgagccccaccccagggca

SEQ ID NO: 51221 - DNA, 330 bp, Mus musculus
  source 1..330: mol_type = other DNA
tttgatgttcatcaacatgtgcacacacattcatgcacttgccaaatgttttggtagtctgtgttcaattcccagtaatacacacgtgcctcttctttgttcttcaagcagggtagaaggagcaagctctctgacctaggcccctcaataagaggccctggtgctctggagtgtttctgagactagtacctgtgccactccaatggagataatgcctgtcactgtcagcagccctgtggcaaacacagagtgtccgggagcctccccagatggctttgagaactcccccaggaagagcttctgccttctggacaggggcccaagaggccc

SEQ ID NO: 51222 - DNA, 306 bp, Mus musculus
  source 1..306: mol_type = other DNA
tatgtgtgatgatcatcaacatgtgcacacacattgcacttgccaaatgttttggtagtctgtgttcaattcccagtaatacacacgtgcctcttctttgttcttcaagcagggtagaaggagcaagctctctgatgcctaggcccctcaataagaggccctggtgctctggagtgtttctgagactagtacctgtgccactcaacaatggagataatgcctgtcactgtcagcagccctccgggagcctccccagatggctttgagaactcccccaggaagtctggacaggggcccaagaggccc

SEQ ID NO: 51223 - DNA, 350 bp, Mus musculus
  source 1..350: mol_type = other DNA
tatgtgtgatgatcatcaacatgtgcacacacattcatgagtagtagagcacttgccaaatgttttggtagtctgtgttcaattcccagtaatacacacaaacgcctcttcttttttctttaaacagggtagaaggagcaacagctctctgaggtcctaggcccctcaataagaggccctggtgctctggagtgtttctgagactagtacctgtgccactcggctgagctatggagataatgcctgtcactgtcagcagctgtgccaacttggcaaaacagtgtgtccgggagcctccccagatggctttgagaactcccccaggaagtggacaggggcccaagaggccc

SEQ ID NO: 51224 - DNA, 335 bp, Mus musculus
  source 1..335: mol_type = other DNA
caatctcttcagcacttttgcaagacctactaagagttttgtttatacaaatgttggtacattcccaagacttgatttcttttgcagtaattctttaaaaactaaccaaagacatatggaaattttgtcttaagtatctcttaccagacttttttccagcatttatgatagatacttgttatcttcaaggttgccttgaagctgctacaaagttcaagattaaaactacttgttcagtttagcttgtaaaacgttttcttaaaggcaggataaatttaaacaagttgagtaggctgagtacattgttttaaatgttctcaaagccttgggggcaa

SEQ ID NO: 51225 - DNA, 339 bp, Mus musculus
  source 1..339: mol_type = other DNA
tggaaattttgtcttaagtatctcttaccagacttttttccagcatttatgatagatacttgttatcttcaaggttgccttgaagctgctacaaagttcaagattaaaactacttgttcagtttagcttgtaaaacgttttcttaaaggcaggataaatttaaacaagttgagtaggctgagtacattgttttaaatgttctcaaagccttgggggcaaccaggtgcacctgaagactttgggagcccagtgttatataacaaatcagaatgttagcacagtgacattatgtcaggaaggtcacagtgccttctgtaggctcttctgaagtctcaggag

SEQ ID NO: 51226 - DNA, 370 bp, Mus musculus
  source 1..370: mol_type = other DNA
gcctggttctcactgtctgactgtgaaatggacagcagatggcctcagagctgcctggaggaccgaggctgtgctgagaactcaggctgctcattggtagaagctgctatgagcagtggggacttgtgccatccttcccaatgaagtcatgggcagacagaggatagtccctgcatttgcagaggatggcattccccacattgcaggaaagcctttcaggggcgggagtacagagctcccacgatggcggaagtcagcacagtgacactgtggggtcacagtttgggcatgggatgaagccatccctgggctctcgtgaagcctttgagacgatgggaaacagggttccccggtgttctcttgtctcagt

SEQ ID NO: 51227 - DNA, 395 bp, Mus musculus
  source 1..395: mol_type = other DNA
aactgttaacattgccggaagcactaggctgcttattcctgtatccgagatgaggcagggccaggtctgccctagctctgaggccactagaagtcagaggccaggaacctctgtggccactagaagtcagaggccaggaacctctgtggccactagaagtcagaggccagcactggacaaggtgcagctgttcaagaacccactgaggggttcgttggagtcgaatatcttcctaaaaaaccattgagtatttctgagaacaggactcccatgggctcctagttcggactgacaggcaggcggctccctctggctcctgatggcccctgagttgcagaataggagtctgattgggcgtcctgtcaggcaattaagttccagtttgattgcctcta

SEQ ID NO: 51228 - DNA, 310 bp, Mus musculus
  source 1..310: mol_type = other DNA
agccaggtctgatcccaggatctaaccctggggaggtagaaatgagtcaccggagggtcacctaggacagcttggccaaatggccaagaggccattatgcccgtcccttacgggattccagggccccaagtgtctgtcttgagtcatggaagcaaccagggccctggacatgggccgttaaggaacaaggtacctgggagtcagtgttatgcagggtgaccccgggaacccagtaactggttgtgacccacagtctgggtggcccagtctcaggcacctgggggactggtccaacagagataaaacctgg

SEQ ID NO: 51229 - DNA, 463 bp, Mus musculus
  source 1..463: mol_type = other DNA
gaagccaaactgaacaaaagtttttacaaatagcaaaattttggttaatgactacaagtaggtcattaaacatgtgtaatattctctacctgttctgtagctgtaactgtgatgtacaggcaaaggtgggatatacacttttgtatttttattcttatatgttatttaaattctaatatatgaattatttggattgaattcaagcttgagtgtgaataattattgtaaactatattttacaacttttttcctggctttattatataaattttctatttggtcatggtttaatcatataatttaatgaaacaacttttcttttttttgtttttttcaaattaccggatgatggattaataaaagcatgtagagtgtacactttgttccgaggatgctcgtgagaacccgagacttgctccggccggaagtggtaatctccggcctgcttttcgagccggaaccc

SEQ ID NO: 51230 - DNA, 490 bp, Mus musculus
  source 1..490: mol_type = other DNA
caacagagtgagacgctgcaccctctgctcctgcgggaaaactgaggcagggccaggcccactgtccagcactgctcccttggtcctgactagtagggagctgtggcttcaagtctgggagcctgacaggcgggcacacccagggcaggaaccggaccttaccggtcactactaaggcgcctccagaacagctcttgccgcgcctagaaggtgcagttccagactggcaggcctattcccatcatcaggggccgcaggagcctgccaaccttgaaaaaaagtaggtgctcaacaagtatttgatgactgactgaatgaatgaataaatgaatgaacgaatgaatgaacaaatgaatgaatgaatgaatgaatgaatgaatgaatgaatgacacctctgtggtcagctgaatcctgaaggcccccctccttcctgccaaagaggagctgggcagtgacaggttgggcggcatagccgagctgacactcatc

SEQ ID NO: 51231 - DNA, 468 bp, Mus musculus
  source 1..468: mol_type = other DNA
tcagtatgatgcctgctatgcaggcaagtctgtaccttcacccctgggaaaacagagacagggggaccactgcatctcactggccagccagccagccaaacagcgcaaaaagtttacaaaaattgtatgcgtttcaccataatttaaaaaaacatctacagcggttgtcataatgacaactaaagggcaagtaggaggccagtctgttctcgatagttactcgtgacctgtgaatcacagccttgctgctgccccaggcgtgaccttggcccgctggctacggcagggaacgcggatgacagctcggcgctccggccccggcccctcgcgccgggccccaacccggaaatacggctcttggtcgggggcggggccctcacggcccgccgccaatgacagctagggcgagccggctgcttagcgtcgcgcgggggcggggtggcgctgggggcggcaggcggcggggcg

SEQ ID NO: 51232 - DNA, 340 bp, Mus musculus
  source 1..340: mol_type = other DNA
accctctacaggtgagtgctgggcctttgtggacaggcagattgctgacaaccttttgccattggcatcgtcggagatgctggtgttcggggcactgcccagcagcctcgactgttcatgaccacatgcacgggcagctgcccctcgcaccgtgctgtggacaatttataaaagacagctcctgtctcccaactatatagtaatcattagtagaagccacccttccccctgccctgaacagccagggtggaggatagaagagctggctcccagctgtgtctcatgtggtcgccaccacgtgagcaccgcggccacgtgacagccccttcagctgagagtc

SEQ ID NO: 51233 - DNA, 466 bp, Mus musculus
  source 1..466: mol_type = other DNA
cagtcctccatcagtggtctagaaagaggcctgcacaggtaggccttgtcaggtctttctgagactttcagaaatctgggttacctttcacaggtgtcaatctggtctacatggcaaattccagcttaaccagaacttcacagtgaaaccccttcccacccgggggttggcggagacagcgaagcccaacacgagagcaagtcccagaccgaacacgcacctatgagcgctacggctccgccccgggggaccgatgatcccaacccgtagggttcgagaagactgcgtggagccgcgggccagcgaagacccaggcaaggctgagcgttgggccccgggccccgaggactggtgccagggcccataccaagggctgccggcgagcctggagcctcgctcccccaccggcgcaaagtggtacagcccgtgggggcggggacagatcatgtgacgcgagcgcggccgc

SEQ ID NO: 51234 - DNA, 479 bp, Mus musculus
  source 1..479: mol_type = other DNA
gaggtatgatggcccctaagagctatctggaggctcctagggcagctcagaggaccctgatcttattcccaggggatgctaggatgatccctctggggtttgagcacatcccacgggccaatgtgattccgctgcaggggctgtggctcaattgcacagccaagacagcgacgtctctgccctccagccgggaatgtactcctgcccctagctaggagcccacgtcgagaaggggcagatcaggtccacgtgtgaccggaccagaggcgacttccacgggcagccgtcggagttcagggtccccacctctttaggcgagcccccgccccttagcgcgggaaccgctgtttggctagcgcatgctcccgacttggccgccgccgggcgcaaatgcgcatgctcagagccggcagcactgagacgcggggcactcggggtgggcagcccgcaagcgcgtgcttgtggggcggggccgccta

SEQ ID NO: 51235 - DNA, 652 bp, Mus musculus
  source 1..652: mol_type = other DNA
tgtgccggcagttgaggcacacgcccccactgcggcggccggaccatgttgaagcggcatcttcgcgcatggccgttgcaggagcaagctgcagggaagggtcagtcaggggcagccctgcctggtcagaagtccccaggctaccctccaaggctcaccaaggcaagcgtgggcttcctgccagcccgctgccatggcctgtcgcagtagaagggcttgcagcggctgcaatcagggccctctctggcagcaggtggccatgggtgtccaacagacaccgtgaggcatgcccattgcacttgcatcgacctcccacctgaagctcagtggctgagtaggagtaggggactgtcaccccaccgtccctcagtcacccagtcttggagcacggggctgttgtccagatccaggccctgtgggctgccatcctgcacactgaaggccagaaggcctccaccatcaggctgagcctggggggcgagggcttctggccctggaccagaagggccatcagcaggtgcggccatggtcctgcgacttaagcagggccacggaggttggaccaggggcactgtgggtcctgttgcagtcaggaggtctgcagagtgtgcccgctgcgggtccgaggaatcgcagacgcgattggccgacc

SEQ ID NO: 51236 - DNA, 357 bp, Mus musculus
  source 1..357: mol_type = other DNA
ttacctttccacgagggtgggggtggggtaacaggtgaacaccttgaaccccaagactttgtgctcaaaagattattggctggatctcactaaatccaaacagcttggatttaaaataagacctgagttctttctgctagaacagactgagcatccaagacttcaagcttatgggcctctgggaggagtggcccagaccccagcccagcacgtggcacccagcagcctggcttcaggccgaggaccctgctgggtggtccctcacgggcgggcagccctcccgcgctggcccagcctgtgtctgaatctgcttccggcccgagcagctccgcccctggctaggaccaggcttgctcc

SEQ ID NO: 51237 - DNA, 296 bp, Mus musculus
  source 1..296: mol_type = other DNA
gaccaagcccggcattaggactgtcattcttactgcttaattctgacaagctttttgaaaacggcttctgtcgcccagtccagagagctcatgggctggagtgcatgacccttacgggtcggcagatgacctcagggacacggctgccaccccggctgggagcccgaggatgggaggcggcagcgggggtcaaaagttccagctcctcgagatcttgagaactcggtgcacatgctgtcccaggatggattcgttccctgcaaagacagggcagccatggtatggtccaaacatta

SEQ ID NO: 51238 - DNA, 283 bp, Mus musculus
  source 1..283: mol_type = other DNA
taattaggaaataacctggtctacaaagtgagttccaggacatccagggctacacagagagaaggtcatgagttcaaggtcatatgccaaacaagtcaatattaaccatgtattgacaagctggcctagctttttgagggcaaagaccattgctctgaccacgtagagcagcttagcagacctattctaagtgattgctaagtcatcctggagtcagcaagataggttcggcaaaacctggttaagagcattatctgattagccaaatcagaatgggtagcct

SEQ ID NO: 51239 - DNA, 513 bp, Mus musculus
  source 1..513: mol_type = other DNA
tctgagttcaaggccagcctggtctacagagtgagttgcaggtcagccagggctacacagagaaaccctagtcttccggagtgtgagggttccccatggagatcagcagcaatggggagcaaatcccaagtcagctgtggggataagcctgggcctattccaagagaccacttgtcttttctcgacagatcatctcatgagaatacggaacatgtactcgagtggctgcccggcatcggagcccagcttctgcaattccacatcagtgttggagttggcgcctccaaatgcagtctcctcggccggaagctcagaagaccagccctctctgcctccgggcgggctttttaggatagcccgccggcgccagctgaactcctccgtcccccgcccagcggagaaggcgggaattcgccaaatgcccagagcctgcggggcagtaggagctcccggcgcgtttgaaaacggggcgggggtggggcccgcgcctgcgtgaggcgctccgtgcacttg

SEQ ID NO: 51240 - DNA, 455 bp, Mus musculus
  source 1..455: mol_type = other DNA
ccgtgctcggtccatcctaggacggatcctcaatgcccagaactgagaactgtctttaactcaggtcgggcccggtgtggcgagcctaggtctgagaagcggcagggctcgcagctgctggagtcctgcaggctaaagcgggtcgccgccgagcgaaccgtgcgggatcacccttccgtcggtgaccgcctcgaccacttccgggccgcggcctcctgttcctcgccggcgggcctctgccgcactgaggaacgcaaccggctccacgatgcgccccgccaagcctggcagaaggtccccggaggtcggatgcagccggattcctaccccgcttctcagaccaggacgccggcgcaactttgtcgtcagaggtgagcgggaaggcgcagccgtcgtcgcgcgacgatgagtgtgggcggagcgtcgtagcgcctacggtccccccccccgccccc

SEQ ID NO: 51241 - DNA, 167 bp, Mus musculus
  source 1..167: mol_type = other DNA
tttcttccgcaaataacggagagatttctgagttctaggccagcctagcctggtctacagagtgacttgtcagaaatgtctcctgggagagggggcggggggggggaccgtaggcgctacgacgctccgcccacactcatcgtcgcgcgacgacggctgcgccttcc

SEQ ID NO: 51242 - DNA, 421 bp, Mus musculus
  source 1..421: mol_type = other DNA
cccgcttctcccgggccagccgcgcggatgcccaagctgcagcaacctccattccctcctgcctgggccgagggcacacagatgttcgcatcctactgtctacctaagagagcagaaagtagcactttctcttggtgacatcccgctgcgaaagtgagattcttgatgttacagcctcaactgctttaaacacatttgtgatgagcttcaggccagcgaccccggggctcagagccccaacggtgcacgcgctacgcagagcgccctctgtcggagctgggcaacatgtgccaggcactgcgcagacgctgaatccagagcttaggcgaggctgagccggccgggggcaaacccggggcacctgcaggggcggcccagtgcgcacgcgcgctccgacgcgcccccccaccccctccaggag

SEQ ID NO: 51243 - DNA, 408 bp, Mus musculus
  source 1..408: mol_type = other DNA
gggggggcgcgtcggagcgcgcgtgcgcactgggccgcccctgcaggtgccccgggtttgcccccggccggctcagcctcgcctaagctctggattcagcgtctgcgcagtgcctggcacatgttgcccagctccgacagagggcgctctgcgtagcgcgtgcaccgttggggctctgagccccggggtcgctggcctgaagctcatcacaaatgtgtttaaagcagttgaggctgtaacatcaagaatctcactttcgcagcgggatgtcaccaagagaaagtgctactttctgctctcttaggtagacagtaggatgcgaacatctgtgtgccctcggcccaggcaggagggaatggaggttgctgcagcttgggcatccgcgcggctggcccgggagaagcgggg

SEQ ID NO: 51244 - DNA, 450 bp, Mus musculus
  source 1..450: mol_type = other DNA
ggttaaccttggattgtacagtcagtactataaaatttgttttgagttttataactttgtagcatttacctaggattagaatgcaaattgagtgctggtttcagaagagtcataatttgtatgactcaactaagaactcactttgagtttaatccccaaagagacggcctggggctcagaagctgactctgcctgagatgctgccgccgcaggaaaactgggagggacagttctctcttctgtctcatactggtgcacccttcgctgagttcaagatcagcctgctaaaaaaaagaataaaaggaagacttcttgtgtttgtgccccttgagtcaaataaaaatgcactatttggggcaaattgctggcaaggccgcctctgagctctggcagctcgggccttgtggggcggggccggccggagaggaggagtctgcaaggccgggctgg

SEQ ID NO: 51245 - DNA, 398 bp, Mus musculus
  source 1..398: mol_type = other DNA
ctggattgcttcaccagaggaccctgagtgtctgcccgcacttgcctggtcagaagacttctttttgtttgtttgttttctgctttacaataaaacataaaaaacctgcagtttgttgtgattggaggcagcctctggggctggcacaactgccttcataggtaccctcgccctggtggcgcctcaaggcgcgtgggtgtctctggcatgttgacagacagcctcctactctgtgactagacctaggaacttgggtcagccctggcagagcaggctagggctgggctttccctgaggggatacagttaatggaaatggcttagcatatgctctctggaatgggagccagttctggaatccaccccatggaaggggtggttcccattgtagcccagccc

SEQ ID NO: 51246 - DNA, 399 bp, Mus musculus
  source 1..399: mol_type = other DNA
ctacagtgtactcctatacataaaataaatctttacaaaaaaagtctttggaaaggagcaaatggagttctattgcaacccaggtctgagtccaggattctatattgggtagcaaccctaaagagttcagattctctgggcggctaagaacacattggctgtgtatacatgtaacttcatctgtaattccagttccaggtgggcgctaggcatgcacgtggtgcacagacatgtatgcaatctgacgccctcttctgatgcgtctgaagatagctacagtgtacttaatgaataaatctttaggctacatgtactcatatacataaagtaaataaatctttttttaaaaaagtgagagaaaagagccccccctgcctgtcggacacgcagccctatgac

SEQ ID NO: 51247 - DNA, 510 bp, Mus musculus
  source 1..510: mol_type = other DNA
gatatttgaatatacatgcgcattttcatatgaaattgcattgatctgcacaaagtcatgtataatatgcctcaataaaagtattaatagcggttaagagcactgactgctcttcagaataagatctgatgctctcttctggctacagtgtacttactaaataaatcttttttaaaagtattaatagttaatgaggacgataatagtgaccgattgctgaatatcatacagtaggtaatgtccgtccaaggcgcttacgtgtcagccggcctggcccagggtgactgacctggagtctccgtcacctaggctcagccgccttgcgtcccgcgccattcgcgcgctctgccagccaattattggtgtagctgcaccaggcagccaatggctgcccgcctccgcgcgcctgcccgcgtccgttgcacctcgctgctcgcgggaaacagcgaccaatggcggtgcccggggccaatgagcgtcccggaggcggggcgggcgccgcggctggcg

SEQ ID NO: 51248 - DNA, 222 bp, Mus musculus
  source 1..222: mol_type = other DNA
ctggataatgaccaggcttggcaggtgcgtaggctgggattccaactctaaaatcattcccagtgggcatgccctggagcaaggtacttgttcttggtccagcctgaagcacacgatcgtgcacagaaatatcaacagccccatctgatgctaatggggtgtctagctcaggagtccggaggattcatcaaaggcatcctgaggtttccctggctgactcct

SEQ ID NO: 51249 - DNA, 371 bp, Mus musculus
  source 1..371: mol_type = other DNA
gaatataaatattattcctatctgttcaatgttatttagtagacacataaagctgttgagtgcttgtaatgtatctatctagtctaaattgaaactattcacaagaacatgatgcacactatatttcagtttaaaataaaaaagcacaaaatatttatgttgaatgtgttaaaagaatatttttatatattgggttaaataaaaagtattattaaaaattttaaaaaatggaggcatcaggatcaggctgaacaaacttcttgtaagaaagtaattcttttagtacagtgtttgagatatgcctatactaaaaagaaaagaaaaaatgatttttatctgaaaattttgcattacctagaaattctagcttt

SEQ ID NO: 51250 - DNA, 522 bp, Mus musculus
  source 1..522: mol_type = other DNA
cagctgctgtgtgttcataatgctgcaggcaacagaggaggcctggcgcagcccaagccttcaggcaggtagactagaatggttctggacgaggcatatagacagttatatccaagtccaggctgtcctcgaaggagaacaacgggttccctgacaccgaattcaatgtctgacagcctctggagggccggcaccggtggcacttgtgcccggcttcccggcgtcgccgccgtgccggtgctcggtggccagcccccctgcgcaccgtcgctgtccgcagaggcccctgacccgcgcacccaaacgtggggagggggcgtcgggcgcgggggcggagcctcggagccaggcgcgcggccggcgcgggctgacggaggtcagcggccgcgggagcggacccaggcgtccgggaggcggctcagacgcggcgcgccaccgggtgccggccgccgccgccggctcccgcccctgggccgccccccgcccgtgacgcgctatccgtccctccgcgtcggagctcga

SEQ ID NO: 51251 - DNA, 341 bp, Mus musculus
  source 1..341: mol_type = other DNA
gcactgtgctatcagcacatgaaatcacaacgtctgaaaccacagtaagattgcatttcactttattgctaagaaactcagaaaaaaaaaaaatcaaacataaatctttactttggttaacttttcactgtcttataatgtaatcagactacgcatgcagttttcatacgaggtgtcagaaataagggttaaacccttaggactaaagcacttcagagcgactgctcgcgaggctactgccctgggccacctctgaggaagtgccccagttagccaatcaaatgtccttcagcctagagttcctgaagtccgtgaactacaagttccgacctgccccggga

SEQ ID NO: 51252 - DNA, 333 bp, Mus musculus
  source 1..333: mol_type = other DNA
ccaaagtcttgagacatttttgtcataacaaaacagggctgtgggtgttactactaccaaccgcgtaccagatgagcttatcagtttggaaatagaggctgagaccccagccgtctcagtcgaaggagccccaggtgtgctccgcgcacacccgcccgcggctgcctaggagcagtgcccctctcggcccgcggccgggaaaggtttcaggatacaggagccggaagtcccggggcaggtcggaacttgtagttcacggacttcaggaactctaggctgaaggacatttgattggctaactggggcacttcctcagaggtggcccagggcagt

SEQ ID NO: 51253 - DNA, 422 bp, Mus musculus
  source 1..422: mol_type = other DNA
acgcttgcgaagtggaagctcgcacagctggcacccagaactcagctgattaggcttcctttatccccaagctgggctctgaactcagagggggacagcctaagcgggcagctgctcaaaccgcagcctgactcggggctcgaaacgccgcagcagagggggcggagcttcctccaccttcaagcctggtctgcagcagacccagcggtgcagaaggcggggcctccggaggactcccctcccgtgagaccccgcccaccaaggctcacgctcactgggcggagcctctgagggcgcccttccttcaggccccgcctactgcaggatctgcaatgaagagggcggagcctgtgaaggccttctcttcagcaggggcggagtctgagggcgccccgccccacgccggaggtgggggaggagga

SEQ ID NO: 51254 - DNA, 291 bp, Mus musculus
  source 1..291: mol_type = other DNA
tttaggaaggagctcttttctggagtatctgaagacagctgcagtgtacgtccgttatgcctctgatcagctgagcccagagtgctcggtgcagcagggatctcccaggtccatggactagtctattgagctaggttactgacctcacaggatcctggtgcttccttcactggacaactggagccctttgagcacagtgcacttggagcatgctcctgggatctccgcctcagagcgaccattggcagtggtggcgggaggctgggcctgaatggctgcgccgcctgtggg

SEQ ID NO: 51255 - DNA, 288 bp, Mus musculus
  source 1..288: mol_type = other DNA
agagctacctgtcatcagaaggttaagcaacaataggatttctacattagaagaaggcgtgtttgctaatttatttaatttaagtgaaatgtaagtttctttcccagttttgagagctgtgggtagtgggaagctgaactgcacccctgctggcctggtgccccacacctgccctgagtgggaacccatttgagtgcaactgtggtctggcgtgaggcaaccacgtgcagggggcccattccactggccggtggcctccctgacaacagctcaggtgctgtggcagca

SEQ ID NO: 51256 - DNA, 394 bp, Mus musculus
  source 1..394: mol_type = other DNA
ccaagcctcagcctggatcccagcggatcacttatgtctaagtcccaggcggggacgggctgataattacccactagttggcactagtactttcagaaccaccgtccagctgggagagaagacttctagctgggtgtgttcttggcacacagcctgagctctgagaacagagctgtgtcccacaactttaagggtggatgaatacatctgcagaccctgcgggtcccagacatttaagcgtagcttcaattcaagattcaaggcagctgctccgcggcgcctagagtttaggtcagatgctgcggcccgggacgcaagcctggagccctgcaggcgcagagctacctgcagcagcctctcgcggggcgagctcctcccagtcgcgcggctccga

SEQ ID NO: 51257 - DNA, 297 bp, Mus musculus
  source 1..297: mol_type = other DNA
acaacacctaactttcctgaggacaggcatatatctgtctccacagtactggggacagcagccctatgcagatggttaccagcctttgtgctgggctagccaagacattggtgttcccaatccgtgggcagggcagtactagagaactgctctgtgtagaaataaacatattatttgatacaccttcctagctactcaccccgcgcgcgcctttcgcgcgcaggtcctcctgcacccagggaagggcgcacacccccggcccagggcagctgccggaagcgcaacccgtacttccgg

SEQ ID NO: 51258 - DNA, 265 bp, Mus musculus
  source 1..265: mol_type = other DNA
aggtgaaagtgcagtctcacagtactggactctagcatttggaaaaccatatagggagtagatgagaatttcatcaattgtaaatctaagtgtcaccacctagagctcaggcctatttgctgtcagaaagggcgcagtggcccttgcacttcccctctggccctcgagggttgcctgaccaagcaatcccactccttggtcctagggtttctgggcgcccaggcaggggcctagctagcggggcggcgcgggggcggcgctgcag

SEQ ID NO: 51259 - DNA, 446 bp, Mus musculus
  source 1..446: mol_type = other DNA
tccaaaccaggtttagagacagcctgcctcaggctggtgtaggtatgggtgtccattgagcacccccacaggagctgtcccagcctgcctgacggggaggtgggatgagggagaacactgatatgtctgcccctccctttgggggtgggaaggcctagtcagtggtgactcagtcccaggccattcagggctgggggtggctgcagctgcagccagctgattctagctgtgatgacagggagcagctagcagtgccagggacagggaggtagtggtggaccttgcccttccacccttgggtttgggggctccccactgccctgggtcctggagcagggcagggcctccagcagcttccttccttcctttcttgggacggaaaccaagctgggggggttcagtaaccacccccccacccatccccagggaacctgggccacagtggg

SEQ ID NO: 51260 - DNA, 233 bp, Mus musculus
  source 1..233: mol_type = other DNA
ccaggctggggtgaacaagtcacctgctgtggggctaagcccttcccctgattgactttggctggggaggaggtcttgtgccaagatattgttacggcccagtcaagcctcctgggggaggaatggcttcatgtgctgggatgataggaacgctccagttgaagcaacagggggtaccggaactccctccttgacagttccctttctgggggcgaggaaaggccactgaaagg

SEQ ID NO: 51261 - DNA, 436 bp, Mus musculus
  source 1..436: mol_type = other DNA
taggtaccagttctagctagccaaccacaatatactgactctttctagaaagggttcagatttggacgctgcagaccaaaaatttgtcggattcagtcattactagctgaattacttatgtatgtactatgttcccaggacatccagtgaaatttgcatttaagatacaaacatactacatactacgtccaagtaatgtttgtgttcgaggccagcctggtgtacagagtgagttccaggacagccagggctacacagagaaaccctgtctcgaaaaacaaaccacagttcgtgttttatcggaaatgatgggaaaccctgtagctcctccggcgtttccagagcttgcgtcggcgaaggcggagagggcccgggcggaagtcgcagtgcgcacttccgccaggcgggcggttgcctgagggcacgtcgacggaag

SEQ ID NO: 51262 - DNA, 417 bp, Mus musculus
  source 1..417: mol_type = other DNA
acacaaagtaaagtgtgtagtctctaccagctctggtcccaggaagacagaccatgatcagtctcttaccagcctggcactgaaagagcatcaagtggctctgttagacagctgggacaagatcttatctctggtactgacagtgacagaccatccccacctgaccctgttagcaagtgtgcacaacacctctgagctgagctagatttacctctggtcttctgaggttgagggctcgttctctcctgaatgtaaaggtcaagatgctgggctcctgatcagagaagcaggatgctgcactccaactctgtcatacgggagcgagtgggaaggatccagggcagggctcagaccccggcgcatggacctagtcgggggcgctggctcagccccgccccgcgcgcccccgtcgcagcc

SEQ ID NO: 51263 - DNA, 479 bp, Mus musculus
  source 1..479: mol_type = other DNA
gcttgttccttgttctgctcagtggaggaaacagcacctggagagagcaattcttcctattaaaataggcataataatcttttatccaagctagaggatgaggacccacgccccgtcgcgcgttgctaaggcaccgagaagcgtggaagaccccaaattttgccgcccttaggtgatgcgagaagcatctcggaactcagaccacgcacgccgggctcgcggcgggtcaccaggcgcaagagtacccgcagagccggagccgcagccgccagtgccgcctcggcctgggcctccggcgccgcctcctcccgccccgaggcctcctacgcctccgcgacccgggccgccgcctcggcccccagccccgccccgccgccaggccccgcctcctgccccggcctgagcccagccccgggctgcggttcccgctcctgccgccgcgcgccggcggtggcgtgcacgctcctccgaactgtcgc

SEQ ID NO: 51264 - DNA, 320 bp, Mus musculus
  source 1..320: mol_type = other DNA
agacagggtttcttagtgtaaccagtcttgactgtcctggactctctttgtagaccaggctggccttgatctcagaaatctacctggaggaacccagagttgggggctcctctgtgtgcatcttccaacatttctgaaaaaaagccagagacttagctaagtaaggagattggctttatgacctagctactcggcctaagacagtaatattcccaactttggcaaagctgttaggacatcttcccctgactaaggaaggagaggattagaacagtcttgtacaaagggcctttttgtgcttcaagaaccaggaaactgaa

SEQ ID NO: 51265 - DNA, 379 bp, Mus musculus
  source 1..379: mol_type = other DNA
gcaaattattattattttttatttattatttattatttttatggtttctctgtatagccctggctgtcctggaactcactttgtagaccaggctggcctcgaattctacaaattaatttttaatgaaaagaaaacgagttctaggacaacagtgcttcagagaatctgtaagccctggctgtcctctttgtagaccaggctggcctcgcttaaaggcgtgcgccaccacgcccggcgataggggaagctttaacgttgttgtaaaagacatcttgtctaacaaaactgccagctgccagcatccacggctcccactcccagtggcagcagccggtctcccggcgcgctgttgatggcgtcaaggagttgcggctcctga

SEQ ID NO: 51266 - DNA, 319 bp, Mus musculus
  source 1..319: mol_type = other DNA
cagtggtgaccactaaagttcaccttagtaaaccaaaatctcagtttacaacagtccaggtcagatcatgacctggagtggccttagatcagactggcctcaaattcaaagagatgcctctaccaattccattgtctacccaaaggctttcaatttacagttgaaaaacctctgggcttttccacagatgaatctctgtcccccaagtggggggattaagttcttgatgaagggttagtggagaacttcaacacctaaactgagtacccacttcagggaaccagcctctacaagcttggttctctggacaatgccactg

SEQ ID NO: 51267 - DNA, 359 bp, Mus musculus
  source 1..359: mol_type = other DNA
ggtaaaaaaatcaatgatctcagactccttaatgggcagggagaacaggtagatctcctccaaggacttgatcttcatgtccttaacacccagcttggtgacggggctgcctctcggtgcaggggcgagcagcccgccccgccagcggcccagagccccgcggcctcgaccacggccacggcctcggccacgaccacggcccctaagaccgctgccgaatcctccgcggaagccgccgcggccacctaatcctgggcccccgggtcctccgggccctcccgctgcaccggcgtcgcgcgagatctcgactgcctacgcacagcacccgcaggctgtggttggctgggacgtataaatac

SEQ ID NO: 51268 - DNA, 359 bp, Mus musculus; identical to SEQ ID NO: 51267
  source 1..359: mol_type = other DNA

SEQ ID NO: 51269 - DNA, 355 bp, Mus musculus
  source 1..355: mol_type = other DNA
aacttctggtgtgtttgaagacagcctacagtgtgtactcacatacataaatcttttaaaaaaatgtcaggccagcctggtctacagagtagttccaggacagccagggctcatacgataagttaggttaaatcactttatttgatgtggccacagggcggaccgcggggcagcatgggtttcaccctcccacaccggggcagcgggcggtgagctgaggcctctgtggctctgggcgccgaatctcacccccggctacaagcaagcgggacggcccagcgcgggcgcgagtatttatacgtcccagccaaccacagcctgcgggtgctgtgcgtaggcagtcgagatctcgcgc

SEQ ID NO: 51270 - DNA, 380 bp, Mus musculus
  source 1..380: mol_type = other DNA
caagcgggacggcccagcgcgggcgcgagtatttatacgtcccagccaaccacagcctgcgggtgctgtgcgtaggcagtcgagatctcgcgcgacgccggtgcagcgggagggcccggaggacccgggggcccaggattaggtggccgcggcggcttccgcggaggattcggcagcggtcttaggggccgtggtcgtggccgaggccgtggccgtggtcgaggccgcggggctctgggccgctggcggggcgggctgctcgcccctgcaccgagaggcagccccgtcaccaagctgggtgttaaggacatgaagatcaagtccttggaggagatctacctgttctccctgcccattaaggagtctgagatcattgattt

SEQ ID NO: 51271 - DNA, 449 bp, Mus musculus
  source 1..449: mol_type = other DNA
aggtccaaatacagatttgtgccttctcgaattgcacattatttattacacaatcaaaattctgtagttgtaaaattactgactccattaggtttatgctaccaaaatgataagatttgtgggtctgacttaggtgtcacaactgatgtctatattagactagattatgataaatctctacagctaatagctgtttctaggtgaccagcacctgaggatttccaggttgcaaaaccaggttttaaacacataaactcaagagttttggcagtgcagtcctggacagtgaacaattcaggacagcagggcgaagcactgtgcctagggttcccgaggttcactgggacccaccagccccagggctgctatcttagctggtaggtcagggcaccactatcccatggtgcctcgcggctgcccactacgcaggcgcagctgtcacctttctg

SEQ ID NO: 51272 - DNA, 277 bp, Mus musculus
  source 1..277: mol_type = other DNA
agggcagctctgtgcacactaggcatctctctaagacagggaatgtgtaaaccaaatattaaattttttatcatgtatgtctttaccccacagacatgcagttggatccccagaagcaaatagttctcttaactgctgagcttcaggacaagagacctcagaacagaatcgctcctctggccacagtggtcgttccccaggaccatggtgagtgtgtgggaacactctccctggctggtacaggaggagcctgccaggtgctaaatctgggatctgg

SEQ ID NO: 51273 - DNA, 302 bp, Mus musculus
  source 1..302: mol_type = other DNA
ccttctggtgcaccacagccgcagggccctggagaatattgagctcaagttcattgacagctagtcccacttgttccagagaggaactagaagaagggacatgtaagatgtctggaatggagcacacctgggatgtagcactgggaggcttgatgtagatcttaagcctgggtcggaggttgcggagatacagctgggtagatgcgcctccacgccaatggtattagtagtagctaccattggctagtaccaatgtttatagcctagccgctcagctaagcttcctgggagcggctccctgg

SEQ ID NO: 51274 - DNA, 411 bp, Mus musculus
  source 1..411: mol_type = other DNA
agccctggctgtcctggaactcactctgtagaccaggctagccttgaactcagagaaaacaaaagcaacaaaaaaattagtattatctattttaagctcactctggtctacatcaggacggccagaacgacatcataagaccaaatagtattatctattttatataatactgtggtattttcaaatagtattattttacataatattatatgtgtacctcctgatatatatggtatactcctttaataagagcatctggctgctctaaattaagaatatttcacttaaggtaactgcctgagaccctagtcaggatcccaaccagcaaggaatgggtagtgcctctcccctaaccgtgaacacgtgcgtgagacccgcggccataggggcggagtccacaagcgctggggg

SEQ ID NO: 51275 - DNA, 461 bp, Mus musculus
  source 1..461: mol_type = other DNA
agaagaggcgccgttaccttttccctggtcagggcaactctctgcattcctagtaagcagctttgtagactaggtttcacacatgtgagggccccgggaatctcactatgctcagaggatacaggccttttcactcctggggggcgagggggcgtagggatcactgacatggtggcccgactatcggacaagctctctccacagggcagggctcccaccctaataatgcaacaagcattcctgtcacccgcgccggatgtatgcctggcttcctgccctggacacggtgtcctccggtgatgaggccctggctccgggaaacaggggctgaggccgcacacctgtcgccctggtccaaaggggcagtcccaggcgagggctggggaggggcgtctcggccccgccccgccccgccccgccccgccccgccccgccccgcccctctccggctccagggttgc

SEQ ID NO: 51276 - DNA, 251 bp, Mus musculus
  source 1..251: mol_type = other DNA
ggaaataagtataattttttaactgagttcgaggccagcctggtctggatatatggccagaatttggtgtgatatcaatgacagtccagaaaggcattagtgtactcgtgcacacgcacatgcacagcatgaacatgcttgggctcactagcatgataaatgcagcactaaatctctcagaattttttctagcctcaaaattagaaaatcatgagagatgacctgtcagctagacaccatctcagagcttg

SEQ ID NO: 51277 - DNA, 478 bp, Mus musculus
  source 1..478: mol_type = other DNA
aggtcaacaaacgtcaatgcggcaccaaaagctgagcggctgctcagctcttaaacagagcgacactaaggggtatcccttaaatggagacccataccttcttaataaagatggttcatagactttcaatcagctgaattcaggctggccagctccggggctttggcaaccgtcggactctggccaggagggagcaggtgccagccctctgcctcgatcccggcccggccccgcttctcgcccgcccggcggcgctcagcacctgcgcctgggacgtccggcctcgcacccggccgcgccgcgtccagaccacggcgcgcgcaggtggctcccagcgctgacaggctccggagacacagcgacccgcgacccagcaccatgacccacggggtgcacagccgggtcgcggagtccgcaacaccagcgtcgtgggcatcaacactggcgttggcgactgagtgcctgtctcgcaccgccg

SEQ ID NO: 51278 - DNA, 419 bp, Mus musculus
  source 1..419: mol_type = other DNA
aaagatcatagatgatgcggggcagtcatgtccaggcacagggcatagccggccacgtagtccatggctgcagcctccgggatcgcagcactcccaactccacctcgtggtggaggttgcggcccctcgggagcgtacgcggctcagcacggtgctgcgcatctctttgacgtgatctgactcccccggactacggcggcctccagaggactggcttcggacgctgtccaggtcggagcggccccgcccttccttgcgcagcagcgggacgctgaggtcagcgaaaggtctctgcgtgcaggcgactgccccagagagacgaggaggctcacgctcagcctcctccttgcagaccgagtctacaggccaaggctgctaggcggcggtgcgagacaggcactcagtcgccaacgccagtg

SEQ ID NO: 51279 - DNA, 516 bp, Mus musculus
  source 1..516: mol_type = other DNA
ggcagtcatgtccaggcacagggcatagccggccacgtagtccatggctgcagcctccgggatcgcagcactcccaactccacctcgtggtggaggttgcggcccctcgggagcgtacgcggctcagcacggtgctgcgcatctctttgacgtgatctgactcccccggactacggcggcctccagaggactggcttcggacgctgtccaggtcggagcggccccgcccttccttgcgcagcagcgggacgctgaggtcagcgaaaggtctctgcgtgcaggcgactgccccagagagacgaggaggctcacgctcagcctcctccttgcagaccgagtctacaggccaaggctgctaggcggcggtgcgagacaggcactcagtcgccaacgccagtgttgatgcccacgacgctggtgttgcggactccgcgacccggctgtgcaccccgtgggtcatggtgctgggtcgcgggtcgctgtgtctccggagcctgtcagcgctgggagccacct

SEQ ID NO: 51280 - DNA, 469 bp, Mus musculus
  source 1..469: mol_type = other DNA
tcccgtgtgcattccccccatcccgggcagggcaaagggacagagctcaggggactggctgagccagggccaggttgagggccccacacatggccctcctgcctccccctggggcagcatgtttaccccagcagaaactggctctgcccctgaggctgcggtgccccactgtcttcctgccaaccctctaggaggaaggtagctggtggctctgccaggtgttcctgtcagctgaggtcacagactgagacttggtgggcccacttaggcctagaggtgagtggggggaattcccaggaacccccgagctccctcaccttagctgaacctactgggagacagggcccccaatccccgagactttggggcggacaaagtgcccctccgcaccacccgcaccagaggagcttctgccagctgagggctgccagctacaggcagtggggaaatccactgggcagcagcctgt

SEQ ID NO: 51281 - DNA, 383 bp, Mus musculus
  source 1..383: mol_type = other DNA
cccggaaagaagccgggcggggccgcgcacagcactccacagcagttgggttggctggccacgctcggcctccgcggggctgaaggttgcttccagcctgacggccctcccgagcgccaccgagggacgggtggccggcttgaccgcctgcaaggtcaacccgccggccgccgggcctgaccgggctgggccggcgcggctcacctgcggccaacggccgcccgcccccgccctgcattggcccggcagccgaaggcgggctctatggcagcttcgcgcgggggcgggtctcgcgagacaggactgctgtcaagaggagtttctattggccctcgctagagcggtcaaaaaaaacttgtcaccattggttcaaaggctgcgaa

SEQ ID NO: 51282 - DNA, 304 bp, Mus musculus
  source 1..304: mol_type = other DNA
ggcgcagagccagggccaactccgtggagatggtgcttttcccaaaccccggccaggttcccgggttctgagacctgtctcagcctcacttctgtctgaagtggagatgaaggcacgtgcacacgtgaacgccccccaattctcggaaatcttttcgcagcctttgaaccaatggtgacaagttttttttgaccgctctagcgagggccaatagaaactcctcttgacagcagtcctgtctcgcgagacccgcccccgcgcgaagctgccatagagcccgccttcggctgccgggccaatgcag

SEQ ID NO: 51283 - DNA, 544 bp, Mus musculus
  source 1..544: mol_type = other DNA
cccaggggcgcattcgagtcctctccaggttcaggagcggctcctggacgctggtatcctgccgttcagcgaggatcagaattcaatctgtcctctggtttcgcagtgaacgcagtgaaggcctcctcctcgtgcttgggtaccaacttccctgaaggaaagaagacaagctgactgcctgctggctggacctttgaaagtcaggatgccccaggccctcccgtggtccaagttctgcagaacaagagggaggagcgcacctgcgccgtgtagtcgggcctcacacgcgtgaggcgccagtagcatggctcgtcgtgctgccacagccaggaggaggcggctctcgcgacgcacgtcggcccaggcgcgtaccggcagccggcgaccggagtgcggccgggtcagcgttctagggcgtagagctgcgaatctcgcggctggttccgctgctcgcgcaaggcgcgcacgcggcgagccagctcagcgattgcgcttcaggagctctcccgttccggaagcggccggtgtcctgaacaaaagcatc

SEQ ID NO: 51284 - DNA, 356 bp, Mus musculus
  source 1..356: mol_type = other DNA
tccagcagcagcaactgttcctgctacctataggggatatcagctgccctgctaaccaccagtgtgagcccagggcttctccctgtgctggccagcctcattgccaacaggaggttatctggcagcagctgagttcaggtttcttgtgttaagaaattcgacttgtcttccactgcaggctgcgggcctggtgcgcggtgtgcctctggccccagagctgcagctctgcagtcggaaatctcccaggtttgaggtcgcccggacgcgagaccgtgactctcccggaagcttccggacgtacccggatgcttttgttcaggacaccggccgcttccggaacgggagagctcctgaag

SEQ ID NO: 51285 - DNA, 459 bp, Mus musculus
  source 1..459: mol_type = other DNA
cctccctcttgttctgcagaacttggaccacgggagggcctggggcatcctgactttcaaaggtccagccagcaggcagtcagcttgtcttctttccttcagggaagttggtacccaagcacgaggaggaggccttcactgcgttcactgcgaaaccagaggacagattgaattctgatcctcgctgaacggcaggataccagcgtccaggagccgctcctgaacctggagaggactcgaatgcgcccctgggactccagtctaactgccaggactggcagagaggtcctgtgagaaataaacgccaggaaacagcctgtgttgtggtttcattacgcagcaggtgctcccgcacactcaggcaggacttgggcgccgagactgcgctttgggctcaaatgtgctgggattgcagagccccaggcgcgccaagaggtcctttaagggaggccccgcccc

SEQ ID NO: 51286 - DNA, 243 bp, Mus musculus
  source 1..243: mol_type = other DNA
gagagtacttgctcttagacccacagacaccaggaatgtgtgtgatgcacatacacataaaataacaagtaacttttttttttaagagcattaaataaatttatgaacacatatagatcgactcgctttatatttctgtctccaagcgacacatgtcgcgtgaggaaacgttcctttagcgtcaaggcgctcggggcggaactggatggggctccacccccgcagccaggcgggacttccggc

SEQ ID NO: 51287 - DNA, 601 bp, Mus musculus
  source 1..601: mol_type = other DNA
tggtgtggtcagtccagttttggaagcactgccccagccagaccaagatcactggctggaggggtgcccccagcaggcagagctcagtgctgtttgcttgaatttgttttatagactataaatatacagtgtatgtataaagcagaatgcctgattattttttgtaccatattgtaaattacattatttattctttaccaattttttgggaataaaaggtgttttggttatttaataaacaagaactgttaaaacttcggctaaaatttccagttgcttgtaaatgtttttattgtgcataaatacatactaatacttcatcaaagccagtatgcttagggtattccaacaggcacaggagattcagcgattgagtgaccgctgaatgcggaattcattacagaattcgctggccatccagcccgggataggtcggccagaaaatgcggattcgcatgcggaggcgaccaatgcccacgcctgaggcggcgccccctgcagccaatcggctgtaagcgcgatgcgggcctccaagcctccctctccttgggggcgggagggaggagtggggactggcttgggcgggtcagggtacctgcgc

SEQ ID NO: 51288 - DNA, 419 bp, Mus musculus
  source 1..419: mol_type = other DNA
tccccggcgagagcttctctggaacgttctgagtaccggacaccgccccggcgcgtggcgcgttgatgcctcgagagaccgctgcaagcggtactcagcagaggcttgcagcagctaggcacagggttccctgggtgaccgtgtgcactttagcccaacggcgagtcgctggtgcataagcattagagttttaaaaacacatttccttatcgcttcgaataggaaaagtgttacatttatggtcttaaacctagcacgctgatcctattggctgtcggttggccaatcggaacgccccacgttgcgggcccgcccctgtacatcgtgcgggcgcgcgcacgtaacctggttgggcgcgcccgcagaaaagctggacgtgctcgtcttggcccgctccggcgccgacttcaggtccccgg

SEQ ID NO: 51289 - DNA, 607 bp, Mus musculus
  source 1..607: mol_type = other DNA
tgtgctaacccactcgccggcgcgctgggccctgtccccaggcacagtggactccataggagtccgtcaccgcccgtcacttcctgaccgtgggaggcgcgggcactgtgggcctcgtcccggctccagggagaagctcgcaccttcctgaggagctgaccgctggctgcacgcggcgcagcccacgaataccgcggcccctccgcggatcccgaaggctcccaagtgcagccacgcttcccggcagcctggctcccggatcccgggcctccgcagaaccgaccgggcccggcagctccggctgcggcgaagccgcgacgccgggctggtggtcaggtgtcaggcgcggtcacgacctctccgtggactggcgcgcggctaacagggctgacggcaccggtgcagccgccactcgcccacagttccggctacggcggccgccggggacctgaagtcggcgccggagcgggccaagacgagcacgtccagcttttctgcgggcgcgcccaaccaggttacgtgcgcgcgcccgcacgatgtacaggggcgggcccgcaacgtggggcgttccgattggccaaccgacagccaataggatcagcgtgct

SEQ ID NO: 51290 - DNA, 596 bp, Mus musculus
  source 1..596: mol_type = other DNA
cggatcccgggcctccgcagaaccgaccgggcccggcagctccggctgcggcgaagccgcgacgccgggctggtggtcaggtgtcaggcgcggtcacgacctctccgtggactggcgcgcggctaacagggctgacggcaccggtgcagccgccactcgcccacagttccggctacggcggccgccggggacctgaagtcggcgccggagcgggccaagacgagcacgtccagcttttctgcgggcgcgcccaaccaggttacgtgcgcgcgcccgcacgatgtacaggggcgggcccgcaacgtggggcgttccgattggccaaccgacagccaataggatcagcgtgctaggtttaagaccataaatgtaacacttttcctattcgaagcgataaggaaatgtgtttttaaaactctaatgcttatgcaccagcgactcgccgttgggctaaagtgcacacggtcacccagggaaccctgtgcctagctgctgcaagcctctgctgagtaccgcttgcagcggtctctcgaggcatcaacgcgccacgcgccggggcggtgtccggtactcagaacgttccagagaagctctcg

SEQ ID NO: 51291 - DNA, 475 bp, Mus musculus
  source 1..475: mol_type = other DNA
acacagtctcagacctggtgaaggagagcaaatgtacagtcgctctgtccagccttttgctagtaagcaaacttggctgctcagaagtcacatcagctatccagcctgcttcccttgcagaggttcctcaaggttcccctcagcagatggtggcctgcctcaggtgcctctacaccgttgtggtgacccccaaccataaaattagtttgttgctatttcacaactgtaattttgctattgttatgaattctaatgcaaatatctctcaggtgacccgtgtaaaagggtcatttgaccagcacctatcatgccttaggcaatggatggatggatggatggatggatggatgtgcctgcccgtgctgtctgcagcatcccctggtccgggacctagcacagctggcatccctgactattcctatgggacaggaagccagtggtgggctggagcaggcctctgaagtctccccaggcc

SEQ ID NO: 51292 - DNA, 187 bp, Mus musculus
  source 1..187: mol_type = other DNA
cttttagggctaagggtcccaatgcctccagtcccctaatactagttggcaagctgctcaggaacttgatgatgttcttccagatcaggatggtcaagaaatccctgggtgtttactcacgcctaccggagtcctgccctcaggccttgcccctcttgcgcaggcgcagatgctgcggtcatcagcg

SEQ ID NO: 51293 - DNA, 386 bp, Mus musculus
  source 1..386: mol_type = other DNA
tgttgagaggtcctggagcagaacttggatcaatttcctgtatgtctagcttgatttcaacattacataatacatttatcaaaatatcatattaactcaaaacatgtgcatgagatagatagggaagaaaaacatagctaattttaatttaagttatcccattctagaataagataaagtgaaattcagtctcatttctaagagggattccttctccaaggcagtgagacaggactcatcatggctgctgtggctggaatcctgggcaccagtgcacagctggcttggctgttagagccattatcagctcctgtccaaagaagctgtttcgtttccctgggaacctcgggttcccaaagcccactggattgaaggcagatgccttt

SEQ ID NO: 51294 - DNA, 455 bp, Mus musculus
  source 1..455: mol_type = other DNA
taataaatctttaatggtcagtgctcttaaccactgagtcaattactatttttcttttttaacaaatcttcaatatgtaaattcaaactattttaattctttctaattaaggctttgaaattttattgttgggaaagtttttatctatcgtaatagttttgtaaatgatttagaaagtaaggcattttcccgggggataagttcttgcttaagatcttggcctaggctattttctgaggtcaatagcctcagtttgtggaacttgtcatacagatcctactggaagtggtgtggcatcaggccggaatggctgccactgccttcagtgaagacactaattgcgttctaggtttctaccctgggctgcaacgaccagcacaattcccaggagactccgcgctcccggatcttgccggcctccgtcgtcagtcacgtgggcaccgatgatagatcac

SEQ ID NO: 51295 - DNA, 420 bp, Mus musculus
  source 1..420: mol_type = other DNA
ctggggactccagtgctaaggaatccttatctctgtgctgagctgagcactggaccagccagaatttccggcaggatctgaggccagctggtgccagttttctctaaaaatgttagaaaacaggttctcagtagatgctagtcattaacgcgtgtggtggcacaacctatgaccgggcatgccagtgctgagaacgggaatcagaagtcgaaagtgatttttgaggccaggctgaactaatgagacggtccggacaggacagtaggctcctaggtgctgttgttgcagcacctccagggttgggtggaggcagtgttgccacccagccaggcagaagctggccaagcaatgtggtagctgctgaaggctggccaggctgggccctgtttaaagctcaggccctgtggcactaccttttct

SEQ ID NO: 51296 - DNA, 418 bp, Mus musculus
  source 1..418: mol_type = other DNA
aagctggcagctcctgcctttcagttgtccctccaaaagagcggctcttccttccatgaagagagagccccctgttctctgccttgggctcagcattctggggagtgtgcagttcttgaagagtactgcagccagcccagggcccagtgggagggccgtccagggactctggcctttgcagagcatggatggcatcctgtcctcaagcctggcacatgcagtctgtccacagctgtgtgctgactacatgctgaaatgatatttttggatatattaggttaaataaaacaatcaaaatttgtctcttccagtatttttattttgagccctagagccaggggagactcttctgcaatggggatacttcactgacccccaaatcttttcaggatccagaagttagggcactggcagttgg

SEQ ID NO: 51297 - DNA, 309 bp, Mus musculus
  source 1..309: mol_type = other DNA
tttgtttttattcatgtcactggtttacagatcaagaataaaatcggagtgataatcattattaagaagacagacactctggatgcagagcttcaatcagcttccagatcaaaagttagctatgggctccctgtaggattccattcttcctgaaggcaaatggatggccgggaggcgtttaaggcgcgagggtttcccgcctccgtgcctgagagctcggagggaccaagtccctcccggacgatggtcccagcctcgggccaagctcttcggagaaccgagctgcttccgccgcgatgcatcatttcc

SEQ ID NO: 51298 - DNA, 441 bp, Mus musculus
  source 1..441: mol_type = other DNA
tgcttagccggcatggacctgggtccgggcacgcacatggctccgggtgtcaacaactcaaagaatttgtctacaaaaatcctaccagcaaatggtaattttaccttactagtactttaaaatatagcatacatacctggaccgagcacgtgcagttagcattctgcggaccccagatcagtctgattactgtgtttttaaaaaagttccttaaattcacaaatttaataaaggggcgaccatcgtcacagtctaattataagaggccatcatggggctgccgtggtgggccggcagaacctgtgtgtcacccccgccgcacagcgcgcgtgggcgaggggtcggtgggggcgtggccggcgtggcgtgcccgggggtgtggccggcgcggcggggggcgcagggggctcggtgcgggggggagatccgggggcgccggcg

SEQ ID NO: 51299 - DNA, 461 bp, Mus musculus
  source 1..461: mol_type = other DNA
gctgtctgtcagagagcactacagatgagagatcactctgctatttcgaagttatggtttattgcaatagtagaaagctgctctatgaaaagggtcaaattaaatacaactctgctcatattggtgggaagggcattccaacccctctctctgccggagacacgtactcagtgcctactgggctgagcaacctttggctcaggcgcaggcagcgcaccagacccagacgggccagtttgcggcccgtgcagcgcttggggtcgcagtgcacaaggcagcgccgcagggcccgggccgccctggtcctcggcctcctcgggctgcacggggagagagagaaggccgggtcctcagcgcctgctcccaggcccgcagagggtcgccgaacacgaccgctctctttccgtttgttcaagagcgtgcgcgcgtgcgcgctcgcacagcttccggagtcagttccg

SEQ ID NO: 51300 - DNA, 412 bp, Mus musculus
  source 1..412: mol_type = other DNA
ctggagtgttgagtcttcatacccaacatccctagagcttctaattggtctaagcacctgtggaaagtagaggctttaataccacaagttggagcagcttgagtctactataaaagactttgaaagactcttaggatttctgagttccgggccagcctggaagccttgagcgtaaaacactcaagtttgacaaacgaccgcgctcaccggatacagctgaaggagccagccaggctcggtccccaagccgcaggccgtgatccgcttcatcttcccggcacatgccggcgcgggccctgcggagcggggagaggcgcgagcgacgccagcgcgcggggggctatgtgcgcggagccactgaccctgcgacgcgaggtctcacggtcacgtgagtgacagccggaactgactc

SEQ ID NO: 51301 - DNA, 612 bp, Mus musculus
  source 1..612: mol_type = other DNA
gaatggccaccagggggccagccgacggttctccccgtcggttgcagaggactggccgaggaaactggactaggccacggcgtgacaaaagcgtgtccagcggggccagcagaagccgcacaggggtaggcctggggcgcgcgcgcgggggggggggtccgcgggtgctgcccctcccccacggcgcaggcccattcccctcccccactagggggttcctgagctggccaattgcagagggatcgtcaccgtactgcgacgacagtgatctttgctcccgggactcgggccttgagcccaaggatacctccagagcctgtgcccgggaaggtgccctctgagcatctcgagtggacgcgctcatcccgaagaggagtttgcagacgctccctcgagcctaggacgcggcccctttaagagtgcggccgttcagggcaccgcctgcttggacaggcgccctgggctcgggctccttaggcggtcgcgggcaacgagggcgcggcagccgcgtgcgggctgcgggaagctgctgagcaggcgtgtggcgggcagcccagctcaggccccgccccgcccgctggggtcctgcgctccgtgctgcgcgcggcgggc

SEQ ID NO: 51302 - DNA, 540 bp, Mus musculus
  source 1..540: mol_type = other DNA
agtccttcccataagaatgagttgagttcaaggccagcctggtctacagagtgaatttcagcttttggtacaaagtggaactacttaccagtggtttcccttgtgtcagtcttcaggggcctactgagccctggatcccagtgggtgctgagaacccacacagtctccaggtgacctcaagctgcacacattcacagatagcagtgacatcacgagatgtctaataccagagctgacttccctggaagagagcagctccgggtacaagaaacacccggccctgggaaggagaccccgtgacagcctcctccctcggggcaggagaaggggggtggggggacagctaacacaacctgtccctgcacccacctgtaggttactgagccctgtgcccagagcagggtctctctggccactaccgtgctggtagagaccccctgccgaccccaaacgcgcagggtaggggtgggcagggctggaacctctgaccagcaaaccaggccaggccccgcctccgcccgcccgcgccccccgcccgcg

SEQ ID NO: 51303 - DNA, 361 bp, Mus musculus
  source 1..361: mol_type = other DNA
caggcctgctgacccatctgctgcctgtggctccacaggtataacttgacctcaaagaagagttggagtctgatgcaggggcataggcgtgagcctctcagaaactggttcagccactggcaaggacccagctgttttgggactaggacactatccaagcctggctaggtggctcccagaaagtaacagtgacagcttgtgtcttccatcagagtctctcagggcaggctttcaatacctgcacagcccgctctgcctgcctgggaggcagtgaacttgccctgactggtcaattcatatcagacatgtgtggccacaacatggccctctggagtacagatgttgcattctgagcccacat

SEQ ID NO: 51304 - DNA, 373 bp, Mus musculus
  source 1..373: mol_type = other DNA
tggaagctgttttgcaggctgggatggatccaaaccagatctgttgcaatgagagaccaaggtccctcaggatctggtgctcactctgttttggggcacccaacaactggcagcaattggacccatagtccatgggaatggccaccagggggccagccgacggttctccccgtcggttgcagaggactggccgaggaaactggactaggccacggcgtgacaaaagcgtgtccagcggggccagcagaagccgcacaggggtaggcctggggcgcgcgcgcgggggggggggtccgcgggtgctgcccctcccccacggcgcaggcccattcccctcccccactagggggttcctgagctggccaattgcaga

SEQ ID NO: 51305 - DNA, 192 bp, Mus musculus
  source 1..192: mol_type = other DNA
tgtggaccggacttcaaggtcagtggaagctgttttgcaggctgggatggatccaaaccagatctgttgcaatgagagaccaaggtccctcaggatctggtgctcactctgttttggggcacccaacaactggcagcaattggacccatagtccatgggaatggccaccagggggccagccgacggttctcc

SEQ ID NO: 51306 - DNA, 337 bp, Mus musculus
  source 1..337: mol_type = other DNA
tgtgttagctgctggatttgatcaaaacacattgtatggaattcccaaagaattagcaaaaacattattattactattattattaaaatcatacatatgttaggccccctctgaccacttcatgctgcctccaggagttccgatggagattagagcctacagtaccagaggggaggctggtggcctctctgccatcccctctctgttgctgaagcacagatgcattggataagcaggtgcccctggtcatcagatagggccttggcccagaccaagcttggattggagggtgtcatgcccttcctcccaccccaccctgttctgggaggataagtgg

SEQ ID NO: 51307 - DNA, 332 bp, Mus musculus
  source 1..332: mol_type = other DNA
ctatatccctgggatgggatccccatcccaatagttggaaggagcagcggctcgtgcagagcactcaactgagaggcatcctcagtatgcagtgctctgcccacagtggacagagcagcagatgggggccatgcctgcccaggtctcctgatgagaagaggctaccagcctcccctcagaagatacccctttccagggagggctggggatgaccactgtcctgccagccagcctgaaataccaagactctgtgtgtgtgtgtgtgtgagcagagtaaccaagcttgtgacctttgtaacctggtgcaccaagcccgcagactcctgggatga

SEQ ID NO: 51308 - DNA, 396 bp, Mus musculus
  source 1..396: mol_type = other DNA
aagttctctcctatgtggaccctgagagagttcagaaggtcaggacttggggcaggggctctgatcccatggaaaccccagtgtcatcaggctcttgggttggtgggatgacacgtgcttccctccactgtctgccatttgttgggagtagactggcaggcaggcacctctagctaccattgcgggcaagtaggcaggtcacatcctgaggaagcagtgaacaacttttgaccttgaaagtgtcagtgggaccctccgaccctgggtctgagatttggagttcctggctctggccaggccatgactctacttacctggggggttgggtgtagccttcaaatgaagttgacagcggtgaggagcctgtatcctcctccctcccaccctgtggcaggt

SEQ ID NO: 51309 - DNA, 367 bp, Mus musculus
  source 1..367: mol_type = other DNA
tcaactgattgctattttgacaaggggatcatgtgatcctctccagtggaacttgggaaatgtgttagagtgcgtcaacatgtcatgctagggtgacactctatatccctgggatgggatccccatcccaatagttggaaggagcagcggctcgtgcagagcactcaactgagaggcatcctcagtatgcagtgctctgcccacagtggacagagcagcagatgggggccatgcctgcccaggtctcctgatgagaagaggctaccagcctcccctcagaagatacccctttccagggagggctggggatgaccactgtcctgccagccagcctgaaataccaagactctgtgtgtgtgtgtgtgtg

SEQ ID NO: 51310 - DNA, 528 bp, Mus musculus
  source 1..528: mol_type = other DNA
cagtggtacatctggctgccccagtcacataggagcacatctggctgccccagtcacataggagcacatctcgctgctccagtcatgcagtggaacatctggctgctccagtcatgcagtggtacatctggctgctccagtcacataggagcacatctggctgctccagtcatgcagtggaacatttggctgctccagtcatgcagtggcacatctggctgctccagtcacataggagcacatctggctgctccagtcatgcagtggaacatctggctgctccagtcatgcagtggcacatctggctgcacacatatgcttatatctggaactttctgctgaagggagctgttgtcatgaatccccgacatctacattctcatccttgtcccacccagtgctaggtgtcatctctggctctgtgtgtgtgtcacactttttcatttttaatgtcaaacataacagagaaagtactcagtactcagtcccttgtcacaatcagggtcacagtgaatctgatgggtggca

SEQ ID NO: 51311 - DNA, 561 bp, Mus musculus
  source 1..561: mol_type = other DNA
taggatgtacacctaagagggagagggggggaacagcccctctgctcatgccttcatgtcttccaagagccccagtccccaggagaagggggtaccagagtacccggactgccccaggacaattggtgtcgcgtcgcgcaacgcgccccacgtcgcccacgcgcccgcggtgggggaagggcacgcgcctcgcgggcatggtcacggcgtgcctcccacgcctgctgagccccgccccctagccgaccctagcagtgaagagaaggggcggcgcgcgagaaaaggagggggtccccgccggctccgcgcccccgcagtgggggtggggaaggacgttggcgccgcttcccccgcccctcgtcgcgagcgccccctgctgccgtgctctcccgcgagacagtatggggcgggaggagaggggggcgcggaccgggttcgcccagtcctggacttggggggtgggggcgggccgggctgatgacccccgcccactctccgtgagggtcgccccctgcccgccccggccgcgttggccccgccccatgggccgcccccgccgcc

SEQ ID NO: 51312 - DNA, 376 bp, Mus musculus
  source 1..376: mol_type = other DNA
tccggcaggggtgtcagggaccttggagccttcactaccccagcaggtggaccccaaggcccttcctaccccagccctggagcccaagggtcccagggaacaagtcctgagcctctgtggctcggatcatctgtgtgtgtgtgtgtgtgaaagagagagagagagagagcttgtgcatgcgcacgcacatgggcatatgagtatttgtgtgcaagcccagaccaactggaactcactacgtagagccaaccttattttcaacaaggtctttcactcggattggttcttgcgaggcaaacattttcttggccctttaagagggcagttgttgctcagcaacaggaggcagttggtgtatacaatgttccttaggcaa

SEQ ID NO: 51313 - DNA, 592 bp, Mus musculus
  source 1..592: mol_type = other DNA
tagggttaccgagctctcgagagccacagctctatgccacccagacaagcttagggtggcaggtacatcgttgagtttggcgagagactcctagctgcacttggagacctccgggctgggaggcaagtcgcgggggcgacctcgggcgcggttgggtcaggcttggctctcgcctgggatccgccttctctctaggcgctgaggagaagcggcccagcgtggtttccgcctccgccagaccacccaggcccgcccgccagggcctccgcgccccgtcatacccggaaggacccgagcccccgcgtccggcccctccctcagggactcagcagtcactgccagagcagcccccccggggtcctccagctcacctaggtgcgggagttaccagggtcacctggtggctcttgtcattgcgccaccctgcgggcagaacccgggtttggttgcaatagcggattcgagccccacatagccctctgaccccgcctcagccgagggatcaggctgcggggcgcctggcccacgtggcggggcatacaagctccgcctggggaggacctgccaacccggaccgggaggggcggggttt

SEQ ID NO: 51314 - DNA, 445 bp, Mus musculus
  source 1..445: mol_type = other DNA
actggccctgcctcccaggacaggcttgcctgttgcagcctgcgtagagcacagcgtgaggtgtacctctgaccccctgcccccgttacagagtctctgagaaatagggaggtggctgccgccgcaatcctgtggctgaggaaggtggaattctgcgggatgccccccagcctccccactgaaggtcacctgcaccaggtgggctgcaagaccacagtgggaagtgctgcattggagtgccctgcataggagggccctgaccagagaactggtcccagtatcacaagattgtcaaactgggactagctcccactgctgcatgtcccaccccaggggagacctgccaaagctgtaggagcagcccagggagctcttggggtcagcccaacccggtaccaaggccccaggtggcaagagtgggcggggcggctgcctgggctccccg

SEQ ID NO: 51315 - DNA, 377 bp, Mus musculus
  source 1..377: mol_type = other DNA
tgaaagatggatggctggctgttgatgccatgtttaaccatgcagcattggtaacttatatgtcaaagcaattctgggctttatagctcaaggccagtctgagctattaaatataaagtcaaatataaaagcagcaatggtccagtggccccataaatagcttgaacacggtcctagatcttcatagaggtgccacctgtatactgaggtctctggggaccacagacatatctgcgccttcctgggcagcgggcagcagaggcacaggcctggccttggagagaccgcccagagagggcgtggcgcgtgggccttggctgcaagaggtccgcgtgtcatccaggggttgtgggcgtggcctccgcgcgcaccgccct

SEQ ID NO: 51316 - DNA, 462 bp, Mus musculus
  source 1..462: mol_type = other DNA
cctgtggctgaggaaggtggaattctgcgggatgccccccagcctccccactgaaggtcacctgcaccaggtgggctgcaagaccacagtgggaagtgctgcattggagtgccctgcataggagggccctgaccagagaactggtcccagtatcacaagattgtcaaactgggactagctcccactgctgcatgtcccaccccaggggagacctgccaaagctgtaggagcagcccagggagctcttggggtcagcccaacccggtaccaaggccccaggtggcaagagtgggcggggcggctgcctgggctccccggactcggacagcccagctagggcttgaccaggtggggcccctaggctaacgggcaactgcctccgggcctcaggggcggggcggccgacagatcgagtccagcggcgcaggagccatcgctgcgcgacgggggcgcgtctgtcct

SEQ ID NO: 51317 - DNA, 595 bp, Mus musculus
  source 1..595: mol_type = other DNA
gatccccagttctgcagttctcagcaggatatcctccaggcacctggtgtctctgttgaccaagctggggcacgcctcagcctgagttggtccgccagcttgcggcgcgccgcctgtgcccacaccatgaaggcattcatgggccgcttcacgtgtggcttggccttgagcgtgccgccaccgccgccgcgcacaggcatacctgcgacacggcatcacggatgcaggctgggaagcgttcgtctgctgcctcagcagtatcccctcggccgccgccccccgcgcggcccaggccctctgatcccgcgggcgacggtggcgcgtcggagtccgaatcctccacgtgtgacatgtgccagacgggctgcagggaggctgggcgcgggcctcactcatgtccagcatcggggccacgcgcggaggggcactcagtggggatggacgcaggggtcgcgcccggcaccgcaggggcccagcagcagctcctccgccgcagtagctcagaaaccccgcccctcccggtccgggttggcaggtcctccccaggcggagcttgtatgccccgccacgtgggccaggcgccccgcagcctgat

SEQ ID NO: 51318 - DNA, 239 bp, Mus musculus
  source 1..239: mol_type = other DNA
tggcgaccctgcagggcagggacgcgggacagtgtccccaccagcgatggcctcttcgaaggttagcggagggcggctcgagggtcccaggaggagcctggtcccgtgttcctgctgagtgctgcagcaggatgcagcctgcgccgccgccacgcggttcccagaggcgcccgccattggccagcggggaagggcgggtcagggccgtccaggcccggaatgccattggccagtacgcc

SEQ ID NO: 51319 - DNA, 304 bp, Mus musculus
  source 1..304: mol_type = other DNA
agggtcagccagctctgggccatgctgccaggctccatggtggggctctggtcttcaagtactgtacacacttactggggccagaacctgctggaaccctttatgtcttccacaagggcccatgccggtcaggttctgacttgccatggactcagggttagggagctctccctgacttgaagtggaataaacagcctggttgtcgaaccaggtcttggcctggcgtactggccaatggcattccgggcctggacggccctgacccgcccttccccgctggccaatggcgggcgcctctgggaac

SEQ ID NO: 51320 - DNA, 396 bp, Mus musculus
  source 1..396: mol_type = other DNA
aactcacactaggctgatagacaggttttgattcataagtggctgcaggcgggcttcttagtgcaggagcctcctggcctgtgaggtctccccagacatgttgaggaggggaacagctccgcactcaccctgtccacagagcccctgaagaggggaccagagcttgaaaaagacaagcgtggtcagcctgatggggccatgtgtttgtgcaagtcacagatacctccagtcccatgcctcaggcccaggggtggtcctgcgtaattcccagcctgaaccactcagtgctcctggtaactcagctgtccactgcgcctcacagcagaggtgccccactgactcagacccagtgcccctccctataggagggctggttttcctaggggcgggccttgt

SEQ ID NO: 51321 - DNA, 455 bp, Mus musculus
  source 1..455: mol_type = other DNA
cagttcctcatgtggaggcctccaaccataaaatttttttcattgctatttcaaattgtaattttgatactgttgtgaaatgtaacttgaacccagggccttgcgcttgctaggagcaagcgctttttttttaaagacttatttattatatataagtacactagctatcttcagatacatcagaagaaggcatcagatttcattacagatggctgtgagctaccatgtggtttctgacctcaaagacctctggaagagcagtcagtgctcttaatcataggttgagaatcactctatatttcctgtgtcagttgaactcgagcatgcgcactgtgccactgtgctcaaccgcttctgcgcatgcgcactccgcagtactctttcaggatcgcgacagggaagtggtgatgtcgcggtgggcagcggccacactccaggactagatcggcggctct

SEQ ID NO: 51322 - DNA, 252 bp, Mus musculus
  source 1..252: mol_type = other DNA
ggggtttgaaaccccctccagctgcatatgtagacccatttgaaatgtaaataaagaaaatatccaatttaaaactggcaaacagaaactgtcctttggccctggtccagtccaagattccaaggcattccagtgaatcaatccggattccgacccctacgggaagcgggagagactctgagtctctacaattgagtccgctgggccgagcgctcaaggccgccggcagagggcgcgcacgcttttcaaatt

SEQ ID NO: 51323 - DNA, 516 bp, Mus musculus
  source 1..516: mol_type = other DNA
cctctcctgcctacacggaagggcaaggcagttggcatcctttctcctcatggcaaaaacagacaagagctctctttcttgcaggccggctggatcaaggagtgacagcggccaaacctgtatctgcagttgcagacactatttgtctttatatgggatgccatacagttcctcatgtggaggcctccaaccataaaatttttttcattgctatttcaaattgtaattttgatactgttgtgaaatgtaacttgaacccagggccttgcgcttgctaggagcaagcgctttttttttaaagacttatttattatatataagtacactagctatcttcagatacatcagaagaaggcatcagatttcattacagatggctgtgagctaccatgtggtttctgacctcaaagacctctggaagagcagtcagtgctcttaatcataggttgagaatcactctatatttcctgtgtcagttgaactcgagcatgcgcactgtgccactgtgctcaaccg

SEQ ID NO: 51324 - DNA, 292 bp, Mus musculus
  source 1..292: mol_type = other DNA
tgagctggatggagcagagcctctctgcagaatacatgtacacagaatacatgctgtctctcaagatctaccattctcagacagttagccttgatgtgggtggtcggggtccagcagcttgactcaaggctctatctaggctgggccctcccgcctaattattgtcgcggaagatcaacagaatttgcgtgagagtgttcagttatagaccctggctataacccgaggctgccggccagcagtacagcctcacatcacccggaacccaaggagggtcccccggatggctgcc

SEQ ID NO: 51325 - DNA, 497 bp, Mus musculus
  source 1..497: mol_type = other DNA
ggcacagtgcgcgagttcaactgacacaggaaatatagagtgattctcaacctatgattaagagcactgactgctcttccagaggtctttgaggtcagaaaccacatggtagctcacagccatctgtaatgaaatctgatgccttcttctgatgtatctgaagatagctagtgtacttatatataataaataagtctttaaaaaaaaagcgcttgctcctagcaagcgcaaggccctgggttcaagttacatttcacaacagtatcaaaattacaatttgaaatagcaatgaaaaaaattttatggttggaggcctccacatgaggaactgtatggcatcccatataaagacaaatagtgtctgcaactgcagatacaggtttggccgctgtcactccttgatccagccggcctgcaagaaagagagctcttgtctgtttttgccatgaggagaaaggatgccaactgccttgcccttccgtgtaggcaggagaggt

SEQ ID NO: 51326 - DNA, 388 bp, Mus musculus
  source 1..388: mol_type = other DNA
tctcaagagagacccagattggggtccctttagcgtctcagatcatttgtgacattgtcagatcacttgcttgcaagtgtgtgactatgtcaccaagcaagggcagaagctgctcttcggccgcgcggcctacggcgaacaccggccgctgagcgggtgctgccgcctggcgcgtgcccgtcggtaccgcaccgggagcgcgcggagaggagcggggcggggttggggattctcgacacctcagcctggctctagaacccggattggtccggacgccgggagcgcgcgagggcgcggctcttagggccgggcggggggcacgcgcggcgccggcggcggccgcggaggagcgcggggagggagggaggaggcgcccgccgggttccct

SEQ ID NO: 51327 - DNA, 276 bp, Mus musculus
  source 1..276: mol_type = other DNA
cagtttaacattattttaaagatcaaaccggcagactaccaggctaggtttggagggttcctattggggatctccaaatggggaaacagctcccgccttgagcccgccccaccccctcgagggtgctgcaattggatggtccgagagcaaaggccccgccccctagccccggagctcagagggggcagcggcgaggggtcgccggttgtggggacgcgccgggccgggcagccgcgccgcgggctgctcgcgctgcggccccgaccctcccggggc

SEQ ID NO: 51328 - DNA, 767 bp, Mus musculus
  source 1..767: mol_type = other DNA
tcagcctccccggtgggaggctcagggcggcagatcctctcccaccggggagctccgctcggaactctgcggagagggccctggcgcggggcgccgggcgcggggcgcagtcgggccctgctagccagtccagcacctcggccgcctccgcgctaggcggctcgggtgctgagctccccatgacgcgaggtcgcccggcggacagcgtggcatgagccagaagccctggcctgtgcgcgcgcggccaggctgcggggaggggagggtccaggtcgagccactgcctccgcgaaggctatgaggagggggcggggtggggacttgggactgcgccgcggccgccgccgcctgagcagggcttacgtaatcgcagccccggccgctgagccagcggttccgcagcccctgccggcctgattgcgccccgctcgctaccggcagcgcggtcaggctgtatctccgtaccacggaattgagcggtggctgcgaggacgcggaactgcaggccgtcagcccccactccttcctccagccctatgagcctccggcggactggagcctaggggtcctggacgccttctggacatgagatagagctgccgcccacagctctataccagggagtgttctagaggccttggccaagattggaaggcttcaaaatggggaatgggcatcctgctgagcaggtgggggatcctccccacccgtcatcccaggagagaaggctgcactgttgaggcctggatctggcctagcagccctcc

SEQ ID NO: 51329 - DNA, 193 bp, Mus musculus
  source 1..193: mol_type = other DNA
ggtaggcatttgagctaagtgcctacctatctcaggggtagaagccagaagccatggttttataacacagctgatgggtcagggtcaggtctctgagacctatatggcttctcgaggccagcctggtctacagagtgaattccagtacagccagggatgctggtattaagatattgagattaaaataaacata

SEQ ID NO: 51330 - DNA, 361 bp, Mus musculus
  source 1..361: mol_type = other DNA
cgaagtttgactgcggcgcccagatcagcagaaagccgagttctgcttctccaagtccggggttcggccaacagctgatgcagcagcggctcacccgcagctacttctatagcaaccgcagaaggtccttcggtgtcagcgttcccgattcccgaggaagcccctcgagagcggtctgatctggacgttcccaggctgtcgcgtgagcccgtgtgtgccctggtggtgcgctaggacccgggcctagtgaccggccctcggaaggccacttctcaatgaccgctgccacgttcgcccagcttggggccggagggcggggcttgagcgccgatgggcggagcaccggaagttccggtggcgg

SEQ ID NO: 51331 - DNA, 337 bp, Mus musculus
  source 1..337: mol_type = other DNA
agtgttcctggaaacaccatagatctgctgcagcgcttctgccggtgaagctgagcaccagcagggcagttagctgccttgcaagcggcccatgagcagccgcggctgggtctgtgacaggtggaggcagcccagagctccccagctgaacagcctggccatcttcagcacatcgggaaggcagctcccactgccctgcaggctgcggcaaggctgatgcagcgtcctcagctcgatcccgatgtccaccggactaggctcacagccccttacccatcctgtgtaccaggatggaaggtggctacaactttttaacccaatactgcttgaggtagcg

SEQ ID NO: 51332 - DNA, 276 bp, Mus musculus
  source 1..276: mol_type = other DNA
acctgacttgagtcctggccatggccggaatccacggcagcaggtctgggcatacatctgcccagtctacaactctaagacactcactatacagaaccatgatggggccctggatgacctctcaggccccgctcagccccgctcgaagtttgactgcggcgcccagatcagcagaaagccgagttctgcttctccaagtccggggttcggccaacagctgatgcagcagcggctcacccgcagctacttctatagcaaccgcagaaggtccttcgg

SEQ ID NO: 51333 - DNA, 250 bp, Mus musculus
  source 1..250: mol_type = other DNA
ggactcggagttgatcctgtgacatgacctcgccccagaatgtccacagaacagggatccctgaaaaatgagcatctaggcaggctgcttattgtaggcaggttagagcttgcaggctgccagctggcctactgggagaagcttctgccgcacgtggtgcaagagctacccaggcaggggccgcgcgtgcgcgtgcaggatatgcgcgtactctggctgtgtgcgcgctgggctggcatctcggtgacgc

SEQ ID NO: 51334 - DNA, 356 bp, Mus musculus
  source 1..356: mol_type = other DNA
aagacttcacatcacgccgggcagtggtggcgcgcgcccttagctgtactgggaaaccctgtgcttccccagtagttggggaaaagtactttaggaatagggtaccccctgagggctctgccacagtactttagatctacttaaacactcttagagcacacaatccaggcttgtccaggcacttggctttagagacggtccctctgaaagagcctctctctctgaaatctcagacagatacactcgcacatgcacgctccagtctagaggtgacttggccaattttccaaagggttgggaaggcgggggcgtgtgtgggtcgctccgcccctttgcccgtcctccctccttaaagg

SEQ ID NO: 51335 - DNA, 415 bp, Mus musculus
  source 1..415: mol_type = other DNA
aaagctttgctcttaagggcctctgaagggaatggctggcccaggcctttaatccctgaactacagaggctggagctgacccagtgcattagttaacaggattaattgtctgggaggcaaagtccattctccaccaggacttagctggaatagaatcctagccctcgactgcaggacgctgcaccccagtgggggggacccagagtaccctggatgcatgtgcatgacctttctggcctctgagagaggctacttagcacagttccctgcacagtgctgaggccccggctgggcgaggccgcaaagccgcaagacctaggggcctgctaggtgcccaggaccacgcagcagcgggatatttgtgcgttgctgcagcggcgacggaagtgacgcgcgttgccggcgccgtgcacag

SEQ ID NO: 51336 - DNA, 308 bp, Mus musculus
  source 1..308: mol_type = other DNA
cctcaggacctgagcgcgacctcaggcttccaagagatcgcgaccgctatggtttccatgggcataatgctgttacattaacatgagtctcgctcaacagcgccgctggtgtagtggtatcatgcaagattcccattcttgcgacccgggttcgattctgaaaaggaaggatgccttgcaatggccgccggaatcagtttcccgaaacccttttaggagttgagaggcctcctaacagttatactgttgcaagcggctggccctttcgaccacaactctagtgccccgcgcaggagctggaccacagc

SEQ ID NO: 51337 - DNA, 274 bp, Mus musculus
  source 1..274: mol_type = other DNA
gcccacaagggagagaggcttgcccctccagggcgaacactaagtggctgtccccgccctgccctcagggaaggcgagccccacagtgtacgacgaacccgggactcagctgaagctacccttccgcttgtccacgaggggggaagggtagagctactatggctctgaggcatcctgcaggaagtgggggcggggcgaccgtgacggccaggctgccaggccaatggcccggagagggccggcggagggtggccaatggcggcggcgcatccgg

SEQ ID NO: 51338 - DNA, 342 bp, Mus musculus
  source 1..342: mol_type = other DNA
tctgggcccaaagggcacatagcaagggcaggtcctctactggacattaggaagcctttcctcccatgttacagatgagatctggaatgagacatgttcttcatgtgggaagaagcaagaaaaagctccttgcttttgctcgccctgttcattatgttatggacaatgaaagaaactttgcttgtaagtaatgctcaataaacactagttactcaccggacctttcaggatatttacagcgagggtagctttgatgacaggagccgcgcgcgcggaactctcgggctcaggcgatggacagcccgggcatgtttggggaccggaccgtcgcgcgacaacgcc

SEQ ID NO: 51339 - DNA, 313 bp, Mus musculus
  source 1..313: mol_type = other DNA
tagccctggctgtcctggaactcactttgtagaccagactggcttcgaactcagaaatctgcctcgagtgctggtgtttctctagaaaaagtgacgtggaaggagcagtgccagcacggttgctgcttcagaaggcagctaggttggactgttcctgggagctgtgaactgagcgtctccggtcacgttggggccctgtgggagccgtagtcccggctccgggttcccagtgccgcgtgcgcccctgacgcgctgtagcctcgggccccggctgggcgccacgctacggaagcagcgtaaggcgtagcgggta

SEQ ID NO: 51340 - DNA, 447 bp, Mus musculus
  source 1..447: mol_type = other DNA
ccctgcttggccttccacgggccagggtgggagacagccagggagggctgctggggccccccagccatagcaaataacttttctccctggggagctgggctgtagcccacccaggacaagctgccctcagaggaggtactgttctcactggggctggactggccaggctagggccagtccgaacaggaccaggaagccaccccactgtgaggcatgctggccagcccagcaagctagctgggcaccattgacctggaggcttcctggggcaccgctgagggcagagccaggggtccaaggtacctcaggtcttaagtcttttctgatcctgggaagcagcagcagcccagcttgacttcagcttcttggtggagctgacaagagggcgaccacgatgtggtcctgggtttttgaggccagcctgtctacagaatgatgcaggcctgg

SEQ ID NO: 51341 - DNA, 592 bp, Mus musculus
  source 1..592: mol_type = other DNA
atctgtactcagggaccctaagagcctctgtaactttctcggcctgctgacaggcccgcaaaaacagaaacgctttactcttgctgccgccccaggcagctgcaggtttctgcagacagtcgtacagtgggccaacgcttagccccggacaagaggcaaggacaggcaggcaccgagggtcgcctgcgtctgaggttcctaggctggcctggagcatcccggctgatgccctgaggccgagctctacgagtcctaggccgtctggccggccgcctaccgtggaactcccttagcgagccggcggcgcctcctcagcgctcgcgatcggtctaggcgggcgcggccctagtgccggccctcagtcggttagggcaccaagggccccttcgcgccagccgcgatgctccgccggcttagcgcgttttggccgcgaagatccgtctcggcccgcgcccgccgtcccgcccggcctacccgctacgccttacgctgcttccgtagcgtggcgcccagccggggcccgaggctacagcgcgtcaggggcgcacgcggcactgggaacccggagccgggactacggctcccacagggc

SEQ ID NO: 51342 - DNA, 276 bp, Mus musculus
  source 1..276: mol_type = other DNA
ccaagcactgagatcgatagtcctggctatcctggaatccaggctggcctcagattcagaaatcggcctgcctctatggcatgtgccagctccacctggctccagccttatgtgtcaaatccagatgccatatttgggttttactgttttgctgaaaatagttcctgttaaaccagaacgataagggtgtcccagaactgtcctgcctccctcctctcccactccggggagctggagaagaggttaaggccagcaaggcctggccagcagccgcag

SEQ ID NO: 51343 - DNA, 391 bp, Mus musculus
  source 1..391: mol_type = other DNA
ttagttagcaataaagagataagcgctgtttatgtaatttaaaaacatgttcagagcagaagtaaaacaacatctgtgcctctttttaccaccagtttgtgaaggagtcacacagaagtcagcaatagttttccaaaacctgggcgtgatcagcacggcgtgctgacgtcacgcgcgacggagggcgggccggcgccggcgccggcgtccctcactggccggccggtgcctgtctcccaccccggactgtgccgctgccatgggcccgcgccagccgcgctgcggggccgggagccgctaaggggcggagcagggcccgagcgccagcctcagcagtccgggcgccccgcgcgcgcccgcccgcgtcgccgcggggatgcccgcgcccgcc

SEQ ID NO: 51344 - DNA, 391 bp, Mus musculus
  source 1..391: mol_type = other DNA
cctgaggcttcttcaaggcccagtgagcgagccttcagtaggagtacatgtccatgatgaccaccacggcctgatgtccatttatgttcacattgacacatgtagagtcactgattcagtttctagacaatggaacccagttcttggttctctgagtttcagtgcacactctggactttccacccgggttagccacgagcacttccacagctgatagcacgcagcccggccagcttgggtatatggactaagtggctgcacagacaccaactcccattctcagtcccagcaggctgcgcgccaccgagggcggggtgtccgccctttttggggtggggcgcccctgtcccacccccgtctgatgggcggcttgatgtgggtggatctttct

SEQ ID NO: 51345 - DNA, 274 bp, Mus musculus
  source 1..274: mol_type = other DNA
acctggtcccttatcactttcctgaaaaggcaggtaatactgggacttcagctgagatccactgtcagctttcatgataggcttgcctccccagtgctggaattaaaggcacgggccacaaatgatgtttggaatatatacccagagtagttctatgtcacgtatacgtgacatctgtcgtcactctggccaaggtgacgcggtccagcatcctcaggaacctagaccgcaggccggctccctgcggggcggggcctcggaggcggaagtgccc

SEQ ID NO: 51346 - DNA, 472 bp, Mus musculus
  source 1..472: mol_type = other DNA
atacctttgtcataaagtcaaactgttcctagacctcagcagtggaagccagcctggtcttcagagagcttgactctaccttcttgatgctagtaaataaaaaataacttttttaatctagagaggtttaaacaaaataaaaaattccaataaataaataaattgatagataacttgaaaatcatccaactgtcaaacttagagagccagttggtatttgcggcgatggccactctgcccccaaaagtagatataacaatatttgactgtacgttatgaaaacaagtatataatctaaaaaatttatacatacgcgcataagtactggggttggtcgagcccaaggctctgagcatgatagtcaagcgctccgtcactgagctgcaccctgattttaacagagatcagtgtggggccccagcgggccccttagggtggaggcggggcggggcaatgcgtggcacctcccact

SEQ ID NO: 51347 - DNA, 400 bp, Mus musculus
  source 1..400: mol_type = other DNA
aggaagtctgagtgcacagaggtcactcactgtctctgacagcaggaggccttcgggagagcctgaggtagcaggctgctcagcctggctccagaaggcacacaaccactggatcaactgaggattaaggagtgggttctggatccccagcccaatctttcactgagctggtagcccagcatcccactgtgaaagcacactttagcccctgaaaggggatatgagcatatttttatgtaattggtgaatttaatattctacaataatttttcaaatcaaatgagtgtgcgtccctggagggaaagggaggttgagctcagggtagcctttcccaacaggcttgccaaagctgctggggaactcctgggcaattggcagcgagcgaaggcgcacgttcggt

SEQ ID NO: 51348 - DNA, 239 bp, Mus musculus
  source 1..239: mol_type = other DNA
ttagagtctgaagccagtactactgcttttttaagtgcagtaattacttgtgtccttgcagacatgtgtgtatttgtgtggagggcgaccagctacccagaaactctacgagcagtagtcgttgccccattgggcaacagtgcttggctcctgagtacgccgcagtcagagccccacaccgtggttctgcctctcaccacggccccgcccccgcacttccgggcggcgccggcgggggc

SEQ ID NO: 51349 - DNA, 331 bp, Mus musculus
  source 1..331: mol_type = other DNA
ccaccagtccccacatagatgttgctggggcagggttggggatttaagtgttcctgtcaattccctaacaggagacctagatctgaaaacaggtgttttgaatacaaggtgaagatcaccttcaaggtgagggctcgtgatgaccttcctccccacagtggacaaggccatcttcatggcattggcacgtggcctctacgtggtcaggtccctcttcactgatgacgacaggctgaaccacctgtcctgggagtggcacctccatgtctgccaggactggaaggactgaaccccacttggggttgagacccagccaggtgccacgtggctg

SEQ ID NO: 51350 - DNA, 515 bp, Mus musculus
  source 1..515: mol_type = other DNA
gttgcaggctgctggcagctgaaactatccccagtgtctcacttgccaaagggcacaggggcatctcccagaaactgttctgcggtcctcagctgaaggcccagccaagattaagagtctaggaacctgcagaattgtctgggtcccaggtcccctttaagagatcttgagtctgtgtggggactgcacttcagtgtgtgggtaccaagaaccaacagggtgtggcccagctggaggctgataggccccaggcagggacgtgggggcgtcgcacctgttccacttggcgtccctggccagcacgccccgcccaggggatcccgggggacccgactccacgtgggggtggggcagctctgggtccctggcgacgcgtcccggcgccgggcgcggcagggacgaccgggttccggcgcggtgcggacgaaacgcgcgtctctgcgggctgcgcggggtccgcggagcggctgggggcgcgcggcgcgggcgcggcgctgggcgcggggggcgctccc

SEQ ID NO: 51351 - DNA, 345 bp, Mus musculus
  source 1..345: mol_type = other DNA
ctgggagatgcccctgtgccctttggcaagtgagacactggggatagtttcagctgccagcagcctgcaacggaggacagctggcctggggccagcctgcacctttccagtcactctgattcattggataagtaaggccaattacccctcctgtggcccctggcattcctagggtagggatttaataaatggatcaatgacctgcctcatatctgtgaagtccacaaatggagttgagacttcaggaccctaaaccactgtttctctgagaaggctcgagaacccgtgtatctcatgggtctcgaggctcacacggttaaccttagcgggcggggccggcatggg

SEQ ID NO: 51352 - DNA, 402 bp, Mus musculus
  source 1..402: mol_type = other DNA
caggctggccccaggccagctgtcctccgttgcaggctgctggcagctgaaactatccccagtgtctcacttgccaaagggcacaggggcatctcccagaaactgttctgcggtcctcagctgaaggcccagccaagattaagagtctaggaacctgcagaattgtctgggtcccaggtcccctttaagagatcttgagtctgtgtggggactgcacttcagtgtgtgggtaccaagaaccaacagggtgtggcccagctggaggctgataggccccaggcagggacgtgggggcgtcgcacctgttccacttggcgtccctggccagcacgccccgcccaggggatcccgggggacccgactccacgtgggggtggggcagctctgggtccctggcgacgc

SEQ ID NO: 51353 - DNA, 442 bp, Mus musculus
  source 1..442: mol_type = other DNA
tgctgcccaagaagatctagctcacccctaaagaattattgctgaaccggtccatctgattcgaggccagcctggtctacaaagtgagcttgcaaaaaatttatgcctactcagagagtaaaagtccttgccaagctattgtgcggtgcctgcgtgtgcactgaggagaagccttagcatgccttctgtctttggaggcattatcatgccaaaatgctcctgcgactggacacagtggccgtgttgctaagcaaccgactcagtcaacagggaatcgctgtggtacgccccttccgctggcaggaagtgacgcacagttcaggtgggccgaactaagggggggggtcacagcctctctggggcggggcctactgcggggcgggcctcctgggtgggcccagtgggggcgtggcacgctgccctcggggccgggcggaccggg

SEQ ID NO: 51354 - DNA, 324 bp, Mus musculus
  source 1..324: mol_type = other DNA
ttcaaggttgagatataacctagaaattcacttatcattaggtttttttttttttaaagatttattattatatgtaatcagagatagtttaatttatttgtttgactaaagtctcattagagcaagtttttaatctagtctttttttaaaataaagatctatttattttatttatatgagtacactgtagctatcttcagttggtccagccctttttttttttttttttaaaaaaaaaaaacaggaggtaggatcttagtctcacaaagaccacgctaaatcaagcttagttgatctagtctttagcagcattccccgcggccg

SEQ ID NO: 51355 - DNA, 316 bp, Mus musculus
  source 1..316: mol_type = other DNA
aacagaggtgaaggaggagtctggcgccctgctcctgcagttccctggacccagaaggctgagctaggagattccaggccagcctggagagatcctctgtgagttagaaccagggtgaagcctaggtctcaggcttgtccccaactccacttgatggagacataggccaatgaggactgcccaaagggcgtgtcccaagagctgtaggcataatttcaggtccagcaaatttctgattctgatggactcaagaagaaaccatggtgatcatcaggaccctgttctgtatagatcacaggatcctcaacagacctgg

SEQ ID NO: 51356 - DNA, 246 bp, Mus musculus
  source 1..246: mol_type = other DNA
gagagaatgaaaggatagccttttttattctcatacagaggctgaaggaggagtctggcgccctgctcctgcagttccctggacccagaaggctgagctaggagattccaggccagcctggagagatcctctgtgagttagaaccagggtgaagcctaggtctcaggcttgtccccaactccacttgatggagacataggccaatgaggactgcccaaagggcgtgtcccaagagctgtaggcata

SEQ ID NO: 51357 - DNA, 488 bp, Mus musculus
  source 1..488: mol_type = other DNA
gaaaggcacgagggcagatgcctttcttagtaagcggctagcagcatcctcttgatgccacgcgacgacaatgttctgggccgtccctaggcggcgctgtggagctctaagcgtaaaacttttaaagtgacattcaagaacctcggtatagccagagggctatagaccgcactccagcagccagagccgggccagctgagaacagtggccccgctcgttcggcggagacccgcggaggggagcagggcaggtgtcctcaggccgcgcgtcctggccacccgggctggcagcgcgccgtcctgcctgcgagcccagaggacaggagggtgggggccgggctgcgagccagcgctcagagccgagaggctcctaggccgatgacgtctttgcttttggctttggcggcgccaagctcggtagggcgggtgacgtcaccgcccggtcacgtggcttctgtgccgcgcccgggaccgcccccgagaggctac

SEQ ID NO: 51358 - DNA, 348 bp, Mus musculus
  source 1..348: mol_type = other DNA
aatgtagtggagccatttcttcaatctcttgtcagattgacaagcccaactctaacaggtggagtcactagatgccaggctgtacctcctttgatacctatgaaaagttgaaaagtggcaacgcaatggctttgttttacaagcacaaaacccactgcctgagacctgggcttgggtagcccgccttcccattcagcgggccctcgggcccctttaatggggcggcggaaggggcggccggtggatgtggcggcgcccaatgggctgcgtggagcgtcacttcccggcggcgggaggcgagtggcgagtgtgctggcgggggcggggcggccgaggaggcgttggcag

SEQ ID NO: 51359 - DNA, 353 bp, Mus musculus
  source 1..353: mol_type = other DNA
ccttttatagaacggtgggagtggatgcacctccccctctcagcgtctggggctcagcagagggatgcggcctaggggatggagaagttccccatccctacccctcatggagcccttgacactgtctggcgtgaccgtcgtccctgagtcgaggcaccacccaaagtggccgaatgcctggacaaggactcggcacccggcgacccatcgacgagggcaggaggccagccccgcctctccagcgcgctattcaaaagacgcggcggcggccccagccccgcccaagcacggttggtggcgggcgcgggggcggggcgggcgcgcccgggccggtggctccgcctcctcccgcc

SEQ ID NO: 51360 - DNA, 298 bp, Mus musculus
  source 1..298: mol_type = other DNA
gtgaggaagggaagacctggaagcatccacttccatgcctcttatgccatcagcatgccatgcctgttcccagcagccatgggatacacaggttgtgaccttgatcaaaacagagactagatccggcttgatgccatttcttgaacctggggccacatgccacatggaacatgacagatgtggtcacccgacgggccacatagaaccacggggtgctttagttaagcctttggctatccagtacaggcgtctggtcctgtgggagacctggacgtcacccctgtgactttataaggag

SEQ ID NO: 51361 - DNA, 486 bp, Mus musculus
  source 1..486: mol_type = other DNA
cagggtttccctgtgtagccctggctgtcctggtagcaggctggcttcgaactcagaaatctgcctgcctctgcctttttaagatttatttatttattatatgtaagtacactgtagctgtcttcagacacacagttgttgtgagccaccgggtgctcttacctgctgactgttagggcctggtcatcctcagctgtccatcgagatgtgacctctctcagatggctgtcagatttacttctgtaactcaggaatgcaaagcaggagcctagcatacaagactctagaacagtagtccactattgtaggttttacttatttatgtctgcgcgtaaaatatagataaaactgtacggtggctggaggttcatctcagtcaagccccatggaaccacagccttgagactagccaggtgcggggctctaggggcggagtccgacggtcgagtcacgccgcgcgcaaagggcggggctttagcgcgccga

SEQ ID NO: 51362 - DNA, 305 bp, Mus musculus
  source 1..305: mol_type = other DNA
gtaaccctgcacccagttcggagaactatttgggataatgaacagtagcagtttctacagctggactcagggtctggggatccagactcaataaatatgagttgatgaatgaacagttaaactgtaaatgaggctacagactgagcgagcttactgctcgcccctctggtgtcacgtgacgggcgctagcccggccgagcctctgattggccagacttcagggcgcctcgcgattggcctggggcggcgggcccccgcctccctcctcctcctcgccgcggcccacgtgaggggggcgagtcacg

SEQ ID NO: 51363 - DNA, 348 bp, Mus musculus
  source 1..348: mol_type = other DNA
ggtgacctaacttaggagaggaaactgattacaagcctggaatccaggcctttgatacttgcagccagctactgagcaccttttaggaagtggcattttaaaacttaagaaataataattttaaaaaacactacccttacttggaatccaattctacacaatgcatacctactgtatacattttgctttaaattttaaagaaaaaaaatgtaactttggtgacatccgaattgatccttttttaacaaacctgaaggccatgtggcatgccagcacgtgacaagaaaagtttcaggtctggactcttgacctggtttgaagccacgtgaacgcgttcaagcttggctg

SEQ ID NO: 51364 - DNA, 335 bp, Mus musculus
  source 1..335: mol_type = other DNA
tccttaaaccctgacagttttcagacagaagcagcactggactgaaaatgtccctccgcctgatctgtcctctgccccgtgccaggaaggagaggtgcctggccccaccgcttagtctgaagcaggtggccactcccttggggcccctctgggttggttgaatttggtcctgtaggtcaaattaactacccttcagtaaacaatattgtagtcataactcagcataacagaatcaggtatttcttgcaatgtgtcgcggcccctttaaaaaaagctgagcaggatttttttccaggcccctggcccaatggcagggtgctccgcgctacctgctg

SEQ ID NO: 51365 - DNA, 403 bp, Mus musculus
  source 1..403: mol_type = other DNA
tctgagtacttagttttgttttgattttttaatctaaaagattgttctaagttcaaggccagcctgttctacaaatctcgaaaaaacaaaataaatatataatttatgttatttatatatattatatatgcttatatataataggtattattgagtatatattatgtatatgtgtaaagatatgtttatgtatataatacatattgtttatgtataatatatattattgacatctccagctcccacttttcggacctgagcagcagccgctaggtggcgctcgctccgccgcgggtctagttctcttgctccggcggactagaagagtcgcgactcagggggcgtggccccggaggcggagggcgccgtgattggctcgcgaccgcagcgccggcgcggattg

SEQ ID NO: 51366 - DNA, 395 bp, Mus musculus
  source 1..395: mol_type = other DNA
tattactgggtatttattatgtaataaagaataatcttttgtatgttaatccttttcttaatcttagattttaaaaaattgtgtggtatatgcatgcaccatgtgcatgggcttcaggtccttcaagaactgggtctaaacggttttattaacttaacggttttagctgccaaaggaaggtattgtaaataaatactgtttaacaatttcttaggactgccaggccccagccccagcccagaacaggaatgctcttgtctggtgtgattcgaaccatggttgagcaaacctacaccagtgctctcgcggccggaggagtggccgtgtgcccaggtgcggcgcacaggcggggttacgcggatgtggcatggggcggggcccggccctgacctgca

SEQ ID NO: 51367 - DNA, 413 bp, Mus musculus
  source 1..413: mol_type = other DNA
tatgcatgcaccatgtgcatgggcttcaggtccttcaagaactgggtctaaacggttttattaacttaacggttttagctgccaaaggaaggtattgtaaataaatactgtttaacaatttcttaggactgccaggccccagccccagcccagaacaggaatgctcttgtctggtgtgattcgaaccatggttgagcaaacctacaccagtgctctcgcggccggaggagtggccgtgtgcccaggtgcggcgcacaggcggggttacgcggatgtggcatggggcggggcccggccctgacctgcaggctagctgccaagaaggttatttcgaccggccgcgcccccaacagcgcagcgccctccgggcccgctggaggtgagggaggtgctgcctgcccgtccctctgtcg

SEQ ID NO: 51368 - DNA, 480 bp, Mus musculus
  source 1..480: mol_type = other DNA
acagggtcacactctgaactctaacttcctctcccagccacggcagtgccaggtctgagcctgcctgatgtggcggggggtggggggaactgtccccacccaaggctgcctgtcagcgcggggagggaggggggctgttactaggcacactccggagctcaggacaactccccggccccagcctgacgcagcgacagcgcgggtcgccaggtctcacgtcacgtggaccgcgaggccggccagcaattggcctccgctcgctgctcctgaggcggcgccgcctgaaaggacaggcctcatcacgtgacggcgggtcgccgcagcggcgttcccctgccagcaaccgcgctggggcgcacgaataaagctgccgattggtcggagggctcgacgccacgcccacttaagagggcggggctaccgggccacttgagggccgggattggccaggtctggagactccgggaaggcagggctgct

SEQ ID NO: 51369 - DNA, 352 bp, Mus musculus
  source 1..352: mol_type = other DNA
agtagggagaagatcttcttactgtgtggtgaaacagaaaaatcatgtttaataaacggagattgttcttttacagagagtctccttccagggtggccagtgctccccggcgttgggcaaagaacagtcccccaaagactccaagtgcagggtctgtgcaagaccctctttaggacccaggtcctcagcaagcgtgcgctccagacttcagacccggttgtcccgcgtgcacgcggagggcagcagcacctacctcgcgcggcgggacgagggaagcaagccttactgcggagcccgtggctcccctgtccgcacagccaatgaggagacggctcctggccgcattggcgtc

SEQ ID NO: 51370 - DNA, 218 bp, Mus musculus
  source 1..218: mol_type = other DNA
gggggtccaatatttgggcactcacatctttcagatgtaatgtattttagatctccctctagctagattctaaaatttaattctggcctggcatgggtctggagaaccttgctgacactagagtctcatccctgactcctttctttaatttagggggtggggtctgagctcagaggtcttgggtaggggtgggggctgcagtctctccctcctcctcc

SEQ ID NO: 51371 - DNA, 299 bp, Mus musculus
  source 1..299: mol_type = other DNA
ctggtatgtgcacacaaagcagatgtccttggaatccagagagaataagctgcctgttgtgggcgctgggaactgaactcagatctctgccagagcagtcactgctcataactgctgggtcatctctgcagctacggcctttttgaatcctctacattttaagtatatacagtctctcagcgtagcttaggctgacctcaaactcgctatgaaatccagatgtatttggtgtaaagatccagactcaccttttgcagatggcctttggtttccaaattcccacaaaggggcacgcatgc

SEQ ID NO: 51372 - DNA, 330 bp, Mus musculus
  source 1..330: mol_type = other DNA
tctcctttcctagaaagccaggctcttcctgacgggcagccaggccaaggcagactttctgacctggaaaaaactctttgcccacagcctatttaagagtggcatcagctggggctcattgggtgagtgcctgggcttgggatgtcccaccccccacccccacccccctgctgcaggggctgcccggccaggcctggtacacagatgatcatgactcccggggagccccactggggccccagccacgtgcctggctgatttggagaggggtcatcaatacccgcatggtgctactgaaccccatcctgtctcagaggcactgactgacgc

SEQ ID NO: 51373 - DNA, 337 bp, Mus musculus
  source 1..337: mol_type = other DNA
cttgctggctgcttccaggggccaaggtttcaggcctgactggcaggaactggtatcagtggattcatggtgctggatgccgcctcgggttgcctcttggcccaggaaacggcaatgaccagctccctctagaggaagttctcggtggccgccggatgcaggcgctcagggaggctgctgcttaggcctcggccgggcttggaagcagctacagcctcccctgcctgctgctgtcctagatccctgcagcctggcagctgcagggacttagacaggagcatatgatgtcctgttctcagcctgtgggtgctgttgacctgctgagctggaccctggc

SEQ ID NO: 51374 - DNA, 345 bp, Mus musculus
  source 1..345: mol_type = other DNA
gtttcggagacgaggggtccgcgccggggctgccatcctgagtgggaccccgactcagggaggccatggcagccctgctagcagaaacctccagttggaaacttccagaagttctaggccagggtccagctcagcaggtcaacagcacccacaggctgagaacaggacatcatatgctcctgtctaagtccctgcagctgccaggctgcagggatctaggacagcagcaggcaggggaggctgtagctgcttccaagcccggccgaggcctaagcagcagcctccctgagcgcctgcatccggcggccaccgagaacttcctctagagggagctggtcattgccg

SEQ ID NO: 51375 - DNA, 533 bp, Mus musculus
  source 1..533: mol_type = other DNA
gcccccatccccgcccctcaggaaataaggggggctgggtgggattcactattaactagaggaggtaatgctctccccctcccagtattatttatttattttaaagcaaagacagaaggagccaattcctcctggagaaagcactttctattgtgcaatgaaaagacttttcatgttgagagaaatgatttgcaacgctaagggcttgagcgcgcatccaggcgcaagacggttctcagctgggcgcggttgccgcagggtgaccgtggccaagttcccggtgtgctcagccacgcgtgggccgcaggctaggcgagctggggatctccgagggtggagagccccgaagtgcagcgcggtgctctagagaacgccctagagcctgggggtcgtccggtggcaagctgggcgctttagggggtgcaggcgtgcacgcgcgcggtgtagaagaggccgagcctggggcgcgggtgcacgtgggagccgcggcgggggcggggtggggtgtggcctccccgcctcccaggcgggat

SEQ ID NO: 51376 - DNA, 349 bp, Mus musculus
  source 1..349: mol_type = other DNA
tattcttgagacaatatctcacctccagtgctgggtcaaaattcacaatggggttctgaggagagaccccctgggtgtgcgaagaatcttcccctcgggcacagagggctggtgggggagggacaccatactaccaccctcctcttcctgtgagacagggaacagttgccaggtcagctgccccagctctgctgagcacagaggcacagctgccctgcacaaaggtttaggaaactcaggttgtccaaagacagggtgtgagccttatgttgacagcctgggatgccccagcaagccctcacctgcccggcctttgtgaggacacagagcctccaggctgagagcaggg

SEQ ID NO: 51377 - DNA, 466 bp, Mus musculus
  source 1..466: mol_type = other DNA
tcattcattcattcattgagcactaatttacagagttctttccacatatgatacccatgtgatatatatattatgttaaattttgccataataaaaacactcattcttagagctagagaaattagttattaagagcatttattgctcttacagcatgtacataaacacactataaaaaaattgttttaaagatttccaggctgcaacaatgtttttggttcttcataagaaaccgtgtgtacacgacggacgttaagatcaaacacatatccatccaataacaacctgtatttacatgcaaatgtttcgtttaaagagcaaagctttccccagggtacaccgcgttagctttgcccctgggagctttcgctctcaaaggtgagcagcgccgctgcctgtgcgcatgtccacggggaaggccagtgcgccttagtgcgcacgcgccctctgcggtcttgactactcc

SEQ ID NO: 51378 - DNA, 428 bp, Mus musculus
  source 1..428: mol_type = other DNA
ccagatctgggatttgatttgtcccaggctgaccttgaactcagagaactctttgccttaatctcctgggattaaaggaatgtattactaagatccaggtcagaagcctgtgtcttccagcttcaagatctggatcagactgcagactctctctgtgtgagacttcctacacgtcgtcaggcctgaccctggacttcaatggcatggcatgtgtgtgcccttacacatgcatgcacacagatatgtatgtatgtatgtatgtatgtatttatctatctatctatctatatgtgtgtatctatacacacacacacacatataaaatgattttttaaataaataattggggactctgcaagatagctgagctgaattccagagctgtggataccagctgacagctgggcattcaggcctaagcgggagaa

SEQ ID NO: 51379 - DNA, 345 bp, Mus musculus
  source 1..345: mol_type = other DNA
gacattttgggtcacccgtggccacagaggatcaatcagagttgcaccttaaaaaaatatatttattttatgtgcgagtgttttacccacttgtatgtgcacaagataccagatcttctggaattggaattgtccagtgcacactcctgaatgcatgcctgaagctggcctgaagcagctcttacaccattgagctcatccattaagtaaatcaacattccattgaacgtttaccacgtgctaacgctgcgcgtccgtggtcgcccttcccatcatggcgcgcggccccgcccgctccgccgcggctgccggcgggagcagttccgggtgcggtgcgcgccgggg

SEQ ID NO: 51380 - DNA, 256 bp, Mus musculus
  source 1..256: mol_type = other DNA
gaaagggtttattctacacttccatactcagcctggactaccagcccagggttggcaacgcctcagtaattgagaaaatgtcttaccagacttgtgtcaagttggcagggacctgagaagaatcaatacctggtatctgttggccgtagatcaatcattccacttcccctgctgaggaagggtgtaagagggcaaggggagggtgtctcctccctcttaatagtgtggacactgcgttgagctcattatccagaaa

SEQ ID NO: 51381 - DNA, 576 bp, Mus musculus
  source 1..576: mol_type = other DNA
gagtcacagtcgtgtgtcactgggccggggaggtgcgtccaagggcccgcgcccggcctgcagggcgcgccccaccgcccgcaacccctgccctcaaggggcttccaggcgccccttgtcttaagtcgtaagtcacgggggcggggagggacctcgtgcccgtggctcctccccgcgatgtcccggcgaggcggccaatcgctcggctcctttgaagcctgcaccgggtggtggccgaggcctccggagacgcacacgccgtctccgggccgcgggtacgcgtggacgtccgagggcacaggcgtcagcgcgcgcctccccgcgaggccggagtccacgggggggctcctgtaggtgtgtccccgggtccccacttaaacagcagggccagaaacgagggccgtcggcgcgcgtgcccgcggaaaccgcgcgcacagtggcgagctacccgcgcgcggcggcggcagctggcgggcggccgcccttttaaatccccgggctcatttgcatggccccgccccccggtgacacggctggcgcgggcgggcccgtcccccctgcccctgggtcgcgctc

SEQ ID NO: 51382 - DNA, 608 bp, Mus musculus
  source 1..608: mol_type = other DNA
cccgtggctcctccccgcgatgtcccggcgaggcggccaatcgctcggctcctttgaagcctgcaccgggtggtggccgaggcctccggagacgcacacgccgtctccgggccgcgggtacgcgtggacgtccgagggcacaggcgtcagcgcgcgcctccccgcgaggccggagtccacgggggggctcctgtaggtgtgtccccgggtccccacttaaacagcagggccagaaacgagggccgtcggcgcgcgtgcccgcggaaaccgcgcgcacagtggcgagctacccgcgcgcggcggcggcagctggcgggcggccgcccttttaaatccccgggctcatttgcatggccccgccccccggtgacacggctggcgcgggcgggcccgtcccccctgcccctgggtcgcgctcccctgagccggggctgtaattgggactccgagtcgggggcgcggctccaagaaggcgcgcacgggccgtgcccagcttcctgcccctcgccatcctccaggggagcgggatccgtccctcgccccagctcggatgtgacacacatccccggcgggggcccgggcggcgcgcacgcagcggtctcagcgcc

SEQ ID NO: 51383 - DNA, 468 bp, Mus musculus
  source 1..468: mol_type = other DNA
gggggctctgtcccccagcatggtgatacatgcctattttagcatccaggattagtcacggactaaataaataaattttgttgtcagtaagagtaattaagtgctcttatcagagttgtccagtctaagtaactttaataatctcatcgcacagtggggaaaggatgtgctgggctccagtcccacaccatcatttcgtttcacggcaacctgctttgaagacgtgaggccctcggccaccgcctctacccgcggcagtcgccaggatcctgcggtgaccactggccccgcccgcccgtgtgcagccgggaaagcgcgccgtcccgcaaccttcccgctgcgcggccctcggtcgccccctgctgccgcggcgtggacgctgcaggaccccgtccggcccgcccacccgcatccggattggccaccatgctggactggggcgccaaggccccgccttctctagtccgg

SEQ ID NO: 51384 - DNA, 528 bp, Mus musculus
  source 1..528: mol_type = other DNA
gattattaatgaagtatactacatacaagatgattaaaaggggacccgtcagataggcctgaccacttaaattcagtctcggatttatttataaatcttgaatatcttgacagaattttctaaacgtttagcactctaagagccagaaaccatatttcatgatttacgtacgtgttggccttttttgcacaaatggctgcaggacgcacatatgtccagacagcccagcagctaaggttgacagtctgcggcgagggacagcagagcggcgctgtcactctccctgtcagcgcgcgaccttggatcgggctgggccgctcagccggtgaccttgggcgggcccctgctctctgcccagcggcgcccgggaccgtggggtcgcgggtggtgcccacgcgccgcgcctcacccggcttccgctgtctgcgtagcagccgcgccagcttccgcggccttcagtgcagacgctctcccgcgccgggcgcgattccggaacgccgtccgcgctgcgcacgcgcggccgtccgg

SEQ ID NO: 51385 - DNA, 360 bp, Mus musculus
  source 1..360: mol_type = other DNA
cagcttttaaattaattactattatttattattattattattattattattttttttttttgccctggctgtcctggaactcactttggggaccaggctggcctctgaaatccgcctgcctctggggatcaaaggccttatttgagaggctttacgaagcgtaagtaaaatttactccagtataagcaggaaaagtgtaccagccatgtatgcttaggtagctcaggctggcctaatctaggcaatgcggaccggcctctctgcacggcaccgtccccactcctcaggcactgccgagggcaccccaggcagcgcgcgggtcctgcagggaggcggagccgcgcagcccggaagagacgc

SEQ ID NO: 51386 - DNA, 365 bp, Mus musculus
  source 1..365: mol_type = other DNA
acttaaatgtatattttaatatgtatctgagtcacactttgatgttgttttattctttgaggaggattagaaaagcctaccctcagtggaaagtcctttaagctgatttaacggcgtgataattgttactttgctatgctgttacttcagctcacactatagtgaactccagagaactggagcctgtcagcctgtcatctgccaggcctctcaggaccagggggtgggacagctcttttctcaccaggtggttcttgagaacccctctggcctcagacaagtgagcatgctccatcttccagtgttcagactgaatagtctctgagctctgtgccaaggaaccaacaagaaaggctccttccctc

SEQ ID NO: 51387 - DNA, 249 bp, Mus musculus
  source 1..249: mol_type = other DNA
gagaactcagcagttaagagctctggctgctcttgcagaggggaataatactttttaaaatttaaaacctatgatagtcaggtgtggtgacacctgtctgtaatcccccttctgggctgccagctctgctctgggacctgagaagaagccagagcaggacctgggccaatggacaatgccacctccagggatgaggagggagggcccgaatcctccttccctcaggaggcaaggccctcaagggttaac

SEQ ID NO: 51388 - DNA, 424 bp, Mus musculus
  source 1..424: mol_type = other DNA
tttactcaagagcttaaggaccggacttcagatccctagtgcttacataacacacacacatgcatgtacaaaataccgtgtatgtgtgtctgtgtgtggcgcgcgccgagtggagtactgagactgttattgttaataaagcagtaccactcttctctatccacactccggatggaggcagaggcactgcgcagtgaggccccagctagtcacaacacagtctatccatgaatttgtgtcagtatttcagtcaataatccccaatgattaagcttagggttcaatcacatgccatgcagcgaggctggcggccaagggggatgtcggcaaacccgtgccggcggcgcgcctgcgcccggatcaccgcggtgtggtgcagaaagagggcgtcccctgctgtccacccagggaggacgtctttggg

SEQ ID NO: 51389 - DNA, 345 bp, Mus musculus
  source 1..345: mol_type = other DNA
cttagattgttccaagagcaacaaatgcttaatcgccaataacaagttattacctttacttttcagataaggaaactgaagcagacagggtttaaaacttgagacccgccccactcacccaggagtgtgttcaaatacaatgatcaatttctcagtgatctgcgggtcgaacaacccgttcacaggtttctcctaagaccaaccgataatttgcattactagtcatacgagtggcaaaattacagacaagaataatttcttgactcaggtaaattacgcacttcctagacggagtaactaatcctgaatacagaggccggaagcggaagtcctacccctcctgtc

SEQ ID NO: 51390 - DNA, 496 bp, Mus musculus
  source 1..496: mol_type = other DNA
tggctgtcaggagcgaagtatctctgctctcaggaacccaggtctcttcggggaaacaagtcatatctaacaggtgacactgagccagctgcacattagtagatacactggatactgtctacagtcatgcctttattttctggaaacgtaatgctaaggttgcatagagcggagcagcaagagtccgctctgtgctgccccccagcctgagcatgggtggggtcgctcgtctccgaagcacctctcagactcgtgactcctcccacgcagtgtggggactcaggcgaggacagagacccgcccagtatcccgctctgtcgcggtgaggtcacgcgagagacgtcaccgagttatgacgtcactgaaggcggaggggcggggtccgagcggccccgcgcgtgcgcgttgggcgcggcccgggaggaggcggaggcggcggtgctgcgaaccgcggcggcagcagcggcggcggcggaggcgggcgctggggggggtg

SEQ ID NO: 51391 - DNA, 342 bp, Mus musculus
  source 1..342: mol_type = other DNA
gtgggcacatgcatcactggagtacttacctcatttgcttgatgtaattaattcagaattaaagacattggctctcatttccattgctcccttttcaaaaggcagttaagtatattgagtcatgtactaatgatcaatagacatttaaatttcctaaagggggctttaagcaaaggaaacaggattattcctggatacgagcctccatttagcagcttaataactgcagatatttttcttgaaactggaagcattaaaggtcagcgtttctctgtatagccctggctgtcatgactttgtagaccaggctggcccccgcgcagcgcctgtgccgccgcgcgc

SEQ ID NO: 51392 - DNA, 406 bp, Mus musculus
  source 1..406: mol_type = other DNA
ctggttgctctgccagagaatctaggaactccagctccagcggatgtaacaccttttgctggatgtggagcactaactcttcagaaaaagtcagaagagaccttctttctcttagttgtcatgagagacattttaaaagtcagatttggggaaccatttccaatttttaatattggatatttgaagtgttaaatgaaaccattggatactttctgtgaagggaaactgccggaagctgctcagtccgaacaacaagcagcgggaccgagttctctccctgttccccgactttgggctgaaggagtaaagcattacatttcacattaaaacaaattccgtttatatgaaggaagtgacccctcccaggatccgtgggcgtgacgtcatcgcggcgcgacgacgagcc

SEQ ID NO: 51393 - DNA, 442 bp, Mus musculus
  source 1..442: mol_type = other DNA
accctgatgaccagcagtgtggtccttcagggcttctttagtcctggagcatccacaccaggggtgagcagagcacaaagtgcctaaggataaattttagcaggggcttcttcccggtcctgaaacactccgcatggatcatccagtttggttcaccgtagagggtgaaggtttcacctggtgcttagagtccctagagatatatctactagatacaaagtagctcgtttctatcagatacacagatatgttggaaacatctggaaacatgttcacgctcctgtggagtttcacagcatggaaccatctgccctcagatgtcttcggggacagaggacccaatgctctggctgccaggctagcatgagctccctgtgctaatggggcctaatgggcgaggcaagggagtgtggctgtcctgccagccagcagcgcctgatgg

SEQ ID NO: 51394 - DNA, 531 bp, Mus musculus
  source 1..531: mol_type = other DNA
tcttctgactttttctgaagagttagtgctccacatccagcaaaaggtgttacatccgctggagctggagttcctagattctctggcagagcaaccaggctagcccgtaacttgctttgtagatcaggctgaccttaaactcacagcgatgctggcagttgccacgcagaagtaaaactctcaggtcttccctccaggaggcaccagagggagggatagttgaaaacagaggtacgcgttacccccttttcttgccatgaggtcccaaacctttgggaaggcgagcagcggggctcctgcaggcgtgccgcctccgatctccgccacctggcgaatgggcgggtccgctaggcgtagaccgcgcctgcgccaggctcggctccgcacaccgaggctcccctccgccaagcgggctcacctgcacggcggcgccgagccccgcccactaggtgggcaagggggcggggcgcgggggcgcggtgacgcgtgacgccggatcccggaagtgacgcgccgccaggggcgtccccg

SEQ ID NO: 51395 - DNA, 380 bp, Mus musculus
  source 1..380: mol_type = other DNA
aaagtttgcccagccaccttgggcagagcacaccattccagagccacagatggctcctctgtgcagggagtttgattccatgcatgcagagtagctacccctctgtggatggcactagggtaaatccatacaaggactcccatggggtggccaattatttatgctccttcagagcagaaggttttgaacggaactagctctagagagcagcagctgtctcctggcttgacaaactagcctgtttccttttccagtggatcagctaaggttaaacttaaacaaataagaaaaaaaaggaaaagtctgttgtctgttcctgcggaaggacggacagccgggctaaaggaagggcgggcgggcaggcgggcgggcgggcggct

SEQ ID NO: 51396 - DNA, 577 bp, Mus musculus
  source 1..577: mol_type = other DNA
ataggttttatgatgacttcaagtcagagtaattctctccccaaacccaaggcgtgggtatttaaaagactttgaggccagcctggtctacagaagaggcatagagaaactttctttgtcttgggaaaaaagcaaaaaacacaagagaatgttatatgtaaaacaagacaattttatatgtatgggtattttgcctgcgtgtatgtaaatatatgtaaatataggagagatccatccctctggaagaaagccagtggtccttaagaatctggaaatggagctcagcctatgaggtcccttccatgcccagcccttggtggtggctcacacgggtgaccccagcatcagcagttcgaggctagcacccctgtgcatgctcttgccccagtctcggtctcacccaaggtggcggctcgcgatgctggtggggagggctgccacgcgcctcgcgcctcgttgccaggacgcaacaccgggcgttcccactcctgctcagttcgcagggtgtggagcatcgacgtggggctcagtggctccacccagccacgccgcacccgcaccccgtgccgcccagcca

SEQ ID NO: 51397 - DNA, 444 bp, Mus musculus
  source 1..444: mol_type = other DNA
taaaacaagacaattttatatgtatgggtattttgcctgcgtgtatgtaaatatatgtaaatataggagagatccatccctctggaagaaagccagtggtccttaagaatctggaaatggagctcagcctatgaggtcccttccatgcccagcccttggtggtggctcacacgggtgaccccagcatcagcagttcgaggctagcacccctgtgcatgctcttgccccagtctcggtctcacccaaggtggcggctcgcgatgctggtggggagggctgccacgcgcctcgcgcctcgttgccaggacgcaacaccgggcgttcccactcctgctcagttcgcagggtgtggagcatcgacgtggggctcagtggctccacccagccacgccgcacccgcaccccgtgccgcccagccagccagagcgggcgggccggcagaga

SEQ ID NO: 51398 - DNA, 581 bp, Mus musculus
  source 1..581: mol_type = other DNA
ggttcggaggacgttccttggaccggagtcccagcccccgccgaggtgcgcgtgcagaccttcgccgttcggccctcctgacgtgcgagcgcggggggcgcaccctcggctcccccgctagctccccacagggaagagcggacgagccggagccccggtgctgtttggtcgagcgggacctccctgctcccggggaagccgtctccatggagaccgggcccgctcccccagcgccggattcctgcaggcagcggcccggcagcctggggagggggccgcgcgcccgggcgcgcagggggagcggccgccacgccgaggccccctagggcgtgtttaggcgctacgtctcccctctcgctctcaggctacagctccccgcgggcgaagctgggcgtcgggtgcgatagcccgggccgcccctcgggccgccgccccgcgcctgcccgcgttccccaccgcgcgctccccacgcccagcccggagcctccgcggggcgccttccgcgccctccccggggctgcgacacccccgcggccccgccgcgcggagctccaggccatgggctcggggcgcgtccccgg

SEQ ID NO: 51399 - DNA, 695 bp, Mus musculus
  source 1..695: mol_type = other DNA
accatgagcagggaaccttccttcagagagaatcatccctcaggaagatgagtcggcccttcctcaggggacaggatgggtgcaccatccctcacacgttccccagggcatatgccagtactgcagggagaattgtcccgcaggaaggactgtcagggctccatccttcataatgtgcaggaaggattgtccctcggggtgtccatgcagaaggaccatctctcacggagactgtccacagggaggaccgtccctaagtccctcagggtgctgagccccagttcaccttctgacccgggagtccagcagagatgactgtcgggacgccatcccttggggcgccgttgcacagggcgctgggaggactgtccctcggagtcccatcccctccaggcaggcctgctggcgaccgcggcttccacccggcgtcgtgacgtcatcacgccctccccgggcgcccgggctggcgaggccgcgtcacccggcggccagcggagagaagagcgaggcggagctccgaggctcgcctgaggagactcggcggcctgggctccggggcccgggaaccgggataagcaggccggccgccgcggcggaggggggcgggctggagcgtggccccgcgctggtcatccgggttccggggcccggcggaggccgcgccgggagcgagagggaagtgcggccgccctgga

SEQ ID NO: 51400 - DNA, 341 bp, Mus musculus
  source 1..341: mol_type = other DNA
cccagggactgaactcaagtcttcaggcttggagacaaactagccaccagtaagatcttgctactcttgaagaggctcgcttcccagcatctacatggacttccagactctgcaggcactgaacgcacatgacatataaaaatagatattttgtaaaacgtatgcgtctgagagtgaggaggttgtattagatgacctccaccttctttttaaagctttaagctgctcccacgtctgactgcagagggcgctgcagacgcgccagggcagctgtgcagtgggcgggtggctccaggcggcgcggcgattggctactgcagcggcgcggtgacatcacgggg

SEQ ID NO: 51401 - DNA, 205 bp, Mus musculus
  source 1..205: mol_type = other DNA
tcggttttagaactccactgacttcattgaaatttaatggccaccatgagtcttgaaagccacggagaagcagctggctctgtcctccacacagctctgtgaggtaggttggcctagagctaccactgggagcctgggaagatcctgaggcaagcagcgggcccaaaggagggctccagctctgggagggtgctccgggtgtcag

SEQ ID NO: 51402 - DNA, 348 bp, Mus musculus
  source 1..348: mol_type = other DNA
cagcatgctgctacatatatagtattagctgctcttgtctggcctccgcgggcactagacatagtgcatttacatatatacaagcaaatcacccatacgcataaaataatttttgctttttttttttttttctctgtatagccctggctgtcctggaactcactctgtagaccaggctggcctcgaactcagaaatccgcctgcctagtgctgggattaaaggcgtgcgccaccacgcccggcataaaataatttttgaaaagaaacattttaaaaagggcagcagtatagtacagccgctccatccgattggctccagacgcaggaaccggccccgccccttcgcgg

SEQ ID NO: 51403 - DNA, 269 bp, Mus musculus
  source 1..269: mol_type = other DNA
caaggccagcctgagctatacataaaaaaaagagagttgttaaaatccatgtgtctgtgtgtcccagaagacatcccaacaaccccaagaattttttgtttgcttttgccctcatatcaaggctggagtacagtacagtttcactcactacgtgctgtgaaagaaccaaatggaatgtcctgggcatcacagtattttatactgttaatcactcacagagaaaataataggtttaattatggtgtcttgataagttcaggacaatctaa

SEQ ID NO: 51404 - DNA, 458 bp, Mus musculus
  source 1..458: mol_type = other DNA
tgagacaaaggagggtctcaggctccagatcttcccatatctgagcctgcactaaaagcttggctgtgcacctgcgagcgcagcataccggccagcctagcctgctcaccagcctccagacctgtgagaaaccttgtctcagaggcgggaggttgctttccctaggaggcctgccacctgcaggattgtatagaaggcacctaaaggccatgcctttagtaccagcagaggcctggaaggactgacctctgcgtgtgcgagccactggcgaccatcactcccatgtcatgagtaatggcagttaagaacgagtttgaggccagcctggtctacaaagtgagctccaggacagcccagaaccagtcaggccaggccactctgctcgtggttggccagcactaaggccagtacagggctcccaggacaccacaccctgtgtttcccagcgccctgtgcac

SEQ ID NO: 51405 - DNA, 390 bp, Mus musculus
  source 1..390: mol_type = other DNA
ttcgaggcccctccgaccccgcgctggggggtttgtagggggtggaaactcaggtgcctgcgttggccccgcgcaagcgcacagggtccgggcccccgactctccgccagtagggaggagagggaggcgggtccgggcagggcggagccaagtctgaggccccggagtggagctgcagaggcctgggctgcccgggacccgagtagggggagcccgagaccccgtgcgcgctcgggtcatttggatgcggaggacgcggctccccaggaccctaaaggagttcagcctagggggcagagctctcctcttggctccgcccgacagcaggccccggcccgcgcccacccgtgggcccgcccgccgttggccccgcctaccggtcccggccgg

SEQ ID NO: 51406 - DNA, 413 bp, Mus musculus
  source 1..413: mol_type = other DNA
tcagccgctcaccatgttgatggcctttagagtgtggatggcacttgcagcttcaacctgcctgcctccaaatgagtcactccagatctggaggctccctgcgacccggcgcctctctatttggacaggggcatttgtccaaagtccaccttgcccggaggctgaatcagggcctcctcccaggtggaggcttaggcttaagccaggcaggccacatgcggtggccggaccattgcacaatgcacggctagagggggcggctgcccagtggctctgcggggcccggcttcagccagcggttctcacggtgcagccgcgtggtggcgcccccccagcggccgcaaactgcagcgcctctccggcttggctgagcgcggaacgtgcccgtaacgggcaactcgctctatttgagc

SEQ ID NO: 51407 - DNA, 463 bp, Mus musculus
  source 1..463: mol_type = other DNA
ctccactcccccagcctggcaccggctgaggcagaggggatggagatgaatctgcttcctgtcagagagccggagtcagagttcgaggcccctccgaccccgcgctggggggtttgtagggggtggaaactcaggtgcctgcgttggccccgcgcaagcgcacagggtccgggcccccgactctccgccagtagggaggagagggaggcgggtccgggcagggcggagccaagtctgaggccccggagtggagctgcagaggcctgggctgcccgggacccgagtagggggagcccgagaccccgtgcgcgctcgggtcatttggatgcggaggacgcggctccccaggaccctaaaggagttcagcctagggggcagagctctcctcttggctccgcccgacagcaggccccggcccgcgcccacccgtgggcccgcccgccgttggccccgcctaccggtc

SEQ ID NO: 51408 - DNA, 259 bp, Mus musculus
  source 1..259: mol_type = other DNA
gactctaaatgagactttaaatgaaaataagaacattatctcacactgggactgtttgtactcaggctaaatagttatatcacagaattctagaaccttctatcgccctggctgatgcaccgtctgcccacgcagaaggaggagagagcctcttcgccccctgtggaagtggggaaccccgggagtttgtgctgcagccagcaccccagggccgggcagtccgctgccggctgacacgggacaagaagggcactcctgc

SEQ ID NO: 51409 - DNA, 392 bp, Mus musculus
  source 1..392: mol_type = other DNA
ggcctatatagcaagctctagatgagccagggctgcatagtgaaaccttgtctttaaaaataaaaaggcagtggtggcgtgcacgcctttaatcccagcacagttcaaggtcagcctggtctacaaagtgagttccaggacagggtcctctttacggaagcaggccatgtgtcccacctacacatgcaataaataaatgtaaacattttaaatgagcgtgtctcaggctgagtatggcaatcctcacactcaggagattggagagtcttgggttccaggccagcccacacaggaaggccctggctacagagtgagaccctgtctgacagtctggagggccactctggccttttgtgaggagagctgggctccagagctcccttcaagaatgg

SEQ ID NO: 51410 - DNA, 298 bp, Mus musculus
  source 1..298: mol_type = other DNA
gagggagcctgagcagggtgcctcccaccgcagcccactgtaggaaggtgcttggagtcctgcaggggaatttccctccacagaggatgatgatgacaatgatgataaccacagaggtattgcgttatgctttttataaagtagataaaagtaaaaaagatggcgccaggcctgggcgcctgcccaggaaggagacgctgctgatagccagatcatttttcagacttagacaaaaagttacgagaccaatagactcgtctggctttggctggccctcagctccattcctaggggatgt

SEQ ID NO: 51411 - DNA, 438 bp, Mus musculus
  source 1..438: mol_type = other DNA
cactggttgttctcccagaggctgggagagcacaggatgcttccaactccagtgacaggggattcgatgccataaacgttcttctaagaatcttcttaaaaaccgaacggtgcagctcctgagcgtctataggagtcacccagacgtggcgaggggcactggggagagagaggtgcgcatggcccgacctctgcagctcgtgaagggcaggctgggtggacagacaggcaaggcagacgcttgtctggcgacgaggcgaggtgtcagtcagcttcctccatccctcttctccggcccccacaaagggcaagggtcgggacgggcggagcgacagcccgcgcgccttttgggggcggattggcagccccgtggccctatgggaggtgggtcctgcggccggcgggggcgggacgacggcgggcgctgcccggcgcacta

SEQ ID NO: 51412 - DNA, 486 bp, Mus musculus
  source 1..486: mol_type = other DNA
tgtaatactaacaggacttttcagctttcaaatctgacttcttataaagacatagatttattcattaaggtattctaaatataaaatcttacagccagtgtgtggcttcagtctaaacccttgcaattcatagctggagaaggtgagcaaggcttttgctcttttcacatgaggaagtgtatacaaactccaaaacagatgttgtacattaaattttgctgtaatttctctttaaagtccaggggatttatttttagagataactcaggaagcattcattagtgtgctctttatgcctgctcggaggttccttaagaaacacaacacaaggcagctctgttttaacatctgcttggtatatgttgaaatgttctaatgagtcagttgtaagttacagcctgagcacaatcattacagatgatggtgtgtgggtcctctgttggagcagacagtgctccagcccagataaccttggtttgtgctgtg

SEQ ID NO: 51413 - DNA, 576 bp, Mus musculus
  source 1..576: mol_type = other DNA
gggtacagtgaggagggtactccggtcccaggtgagctgagcctacggtgccccggcccggagggtccggagatggcggcttgcagcgccgcgccctccctcccagtgcggagccggctgctgaccgcaggctgcaggagcggttgatctggggagcgggcgagcacacccacttacccagctgctgagtcaggcgctcgcccgcccgcccgcccgcccgcctgctctcgcccgggacattgtgttccagccccagcgcgctggcagcgggcccaggcgctcacaccagcctcctcgccggcgcagcctcccgtggccgcggggactctcagaaggcacccctgtagggtgggccccagcagccctgagcacccctggctgggtgcatcccctacccccggatttggctggggcaggtgttgagatcccccaccctccttctgcgaatgtggtcacgtgacaacagaagcccgctttgagggggtcaattcaagcagacttcgggagcacggagactccagggattcccggagcccgcaagcaagcccagcttttttggaaagcttgggtgttact

SEQ ID NO: 51414 - DNA, 456 bp, Mus musculus
  source 1..456: mol_type = other DNA
ctgcccgcactctccggaggtagaggtatgttacatagggtgctaagccaaattaatagcgcgtagtccaagagctcggcctcaactagagatatacctggcttccccaagcatgggtgtccaaggcacatgtatggaggtcagagggcaatttatgtaaatcggcttccgagaggcctctctcccgagccttatcagtagggcttcgaattagtcctgaaagtactggcagcaggactggctcagagaaggtgccgatcctagcgctgcgcaggggacagctcgccatttggggggtgaggggggcgcccgttcctcacagcggatcccattcctgccggggaactcgagctgaggggccccgcgggcagcgcccgggaggaggagcgcggggcggagcgcatcgcccagcttcccccgcgcccccgcctctcgcatccggcggcggcacaggat

SEQ ID NO: 51415 - DNA, 258 bp, Mus musculus
  source 1..258: mol_type = other DNA
tgtagaccaggctggcctcgtggaggaggtgatatttcaaaaagctaggtgctcccaaggttggttactggcacacacctggcttccacgtgcatgtgactttgacacacctcaatgtaaaaaaccaggtgtcttacactgtttattaagagcgctggcggtatgcctgaagacagctacagtgtacttatatacataaataaataaatctttaaaaaaaagtaccctggttctgggccctgccagggttctggttct

SEQ ID NO: 51416 - DNA, 431 bp, Mus musculus
  source 1..431: mol_type = other DNA
cagtaaatttaataaacaggatcatatcctgggtgcatggccactccacccggctctgttcgttaatcgagggggtgctctctccatcctctcaaacgttgtgagccgcgccttagcacaacccaccggtctgcgcccacgagagagcccattggcaaagatcgcgagagtgcgggcctgggtccccgggaaccgcccctggcgatttagggggcttctggagactgcaggcttgggtcctcggaagaccactccaccctcgacgttgtcctggtgggcgcagtcctgcgcctacccgggcaccccagactcgctgcgcgccctaggcgcgggcgggaagctcacggatcctgtgccgccgccggatgcgagaggcgggggcgcgggggaagctgggcgatgcgctccgccccgcgctcctcctcccgggc

SEQ ID NO: 51417 - DNA, 414 bp, Mus musculus
  source 1..414: mol_type = other DNA
tacctggcgactcggtaggattgtcaacctgtgtccagggccagctgtgtcagctcaggaagctttctgagacctgtgggccagcacggccggcagaaggttccagccctgccccgccacaggaatgtagggtcgcaggctagagtccctagcttttctcagagtgggtaggaacgccctctaagggccctggccctggccccttagtgagcttggcagctctgcaccggagtaaagaaaatatcttttccttcacagtttgaattctgtgtttcaaagtgccaccagcccatccagaggctgccaaagcctagcctgggaatcagccgtcccacatgcactgagcaggacagtctgtgaccatcgggcccacgctggctggctcccactcccacagcgacagggacttatccc

SEQ ID NO: 51418 - DNA, 470 bp, Mus musculus
  source 1..470: mol_type = other DNA
caacagggctgactgccttgtagacagctccctgggccgggcagggggttagcatgggaggaaatcttatggtaagcgtgacacaaataccttaggttcctcttgtgagtcaccaagtcaccagatcagatctccagagctctcagcatatggccatatgtcatataagagtttccagttaactcaagacggcagatggagtccactccactgaagtcacttctggctgacagaccagaaggctcagctagaacgtttaggctacccatctctgcccactttttaaaaaattaattgatttatttgttcagctactgggtatcaaacccaggagctcataagcactggaaatactctaacactgaaagacttagccccagagtctattgtcttaacatgaactggagtacgtgcacgcatgagtatacacacacacacacacacaatctgtgactgtttgtgtcacagtg

SEQ ID NO: 51419 - DNA, 352 bp, Mus musculus
  source 1..352: mol_type = other DNA
ggatttgaacttagacctttaaacttgaacgacaaatgtttattcgctgagctatctcctaggctaaagcccttgtcatatacagttatctaaaaaaatctgggtttatatataaatattttttaaaaaggaaatgtgttggcggtcattgactggaagaccaagccaatgacacacggtcggccccaccctctgggaggaagagaggaccggggtcccagctcccttcccctccatccaggctctgcgcggccgccggccacgcccctaccaggccacgcccccgaactctggcgctggccgcggtgctgaaacgcgtttcgcagagcgggccgggcgtggcctgtgaggg

SEQ ID NO: 51420 - DNA, 376 bp, Mus musculus
  source 1..376: mol_type = other DNA
ggccctatttggatttgaattcaggtccttaaggcacctttacttgctgaacagggtgtctctgtatgtagaccaggctggcctcgaactcagaaatctgcctgcctctgctttccaagtgctgggcattatatatgccttgctggcctggaactcatgggctgctggcccaatgtgtatccacatacaatttaatgtcttaattggcccttacaacagctcaaaactgaggcaaatcccgactgactgcggagccctgcctttcctcaggagcgcgtgttcaccacgcaggcgcgcgacgccgtgtggggcgtggtcgggcgggcccggaggcggggccggcgcgcgccgggaggaagagctgggatttgggccg

SEQ ID NO: 51421 - DNA, 420 bp, Mus musculus
  source 1..420: mol_type = other DNA
ggaaggggaatttatatttacactgcaattccggcatttgaacccttcatatacatgcatacatatatatctatttacacagcctgtaattccagcatttagaaagaccagcctttcatactatttatttatatgtacagaacctgtaattccagcatttgaaaagaccaagagacctttctcttatttatttatttatacacaacctgtaattccagcatttggaaagaccaggtatttgtttatttgtatttacaaatcctgtaattctagcatttggaaaaactcgggtttgagaccttccatccaaagtttagaaatttaaaaagacttaattgagggcagcagggaccccttctcctcggcccagatgccagcacagccggaacgcccgcgggttctgcagcaacggctccggaa

SEQ ID NO: 51422 - DNA, 541 bp, Mus musculus
  source 1..541: mol_type = other DNA
aataaataaataagagaaaggtctcttggtcttttcaaatgctggaattacaggttctgtacatataaataaatagtatgaaaggctggtctttctaaatgctggaattacaggctgtgtaaatagatatatatgtatgcatgtatatgaagggttcaaatgccggaattgcagtgtaaatataaattccccttccaatgctggtccccagcctggaagtggccattcatgatgtctgcctgggctttgaggcaagactaatatttgcctagggggcaagcagaccggaatgcgacagctttctggacagggcctagtgagcaggttgctcggagttcaaacacagcggctttccgccatggcgccaggcattcgcccgtgcgaccacagagaggcgcgcgcgccccgcgctgcggcctccacccttggcgccccggggagcccagtccccgagagttcctgcctcggctccccgtgggcagtcagagcggggcctccttggagctgttctcgcgagagttccgcgagaggctcccggccg

SEQ ID NO: 51423 - DNA, 610 bp, Mus musculus
  source 1..610: mol_type = other DNA
gtcgcagcctccacacctgcgcgggtggcgggcgcggggtccggtctgccgcgggcgggcgcagaggagagcgtgcggctgcaggcaggagcccccgctcggccacctcctcgccccgctgctgccgctggaagatgtcgcaggagaggccctctaccggataccagaacctgtccccggtgggctcggggagcaagcagggtggccctgcatgcctgagggccaggcctgtccccacagctcagcgatgcgcccagcggcaggaattctcctccggggcagggggcagctggagcgggacgtgtcctgcacccctcgccctgcatacgcaggtcgggggcgagccgtgtgcgggagcgggtcagctgcggacgcggctggccctcccgggggtcctctgctgcagcgcggcctcaggaccctgcctccgggtaccgccactcgggacgcgggagccctgccccggggagcagacgagctgggcggagctccagcgaggagctgagggcaaagcctgacccggggactgcggtcacctgaacgaaacttgcaagagaaagcgctcctttcccggaatggaaacgttcctagggtggcagcgccttgcaag

SEQ ID NO: 51424 - DNA, 332 bp, Mus musculus
  source 1..332: mol_type = other DNA
tgggggctggtgcacactaaccatgggatccagtgagctgcactccagcctccaggctggcggggttaacagagtttgcagctgctaggaatcctacctggtcagagcagagctggggtctagctccaactgtttgtggtttatgtaagcgagagataaatcagagccagaatttttgttgagctcggaaattcagggtactccacgctctctaaataacatgcttacttcaaaatttttttttgtgagttcagttaagtcacttcagagtatccgagcatttaaaatcacatttatcttaatcaaggaatgttaacttgaatagatacctg

SEQ ID NO: 51425 - DNA, 227 bp, Mus musculus
  source 1..227: mol_type = other DNA
gagacagagtttctctgtgtagccttggctgtcctggaactctgtagaccaggctggcctagacccccctcctccctcagcacctgcagcaggtggctggtggggcctggggcgttcgccggtgatgggcggagtccggagcgcgggcgagcggtgggcgggccggggcgggaacgtacctgggcgaggcggcaggtgcgccgccccacgggggaggagcgggcgcg

SEQ ID NO: 51426 - DNA, 687 bp, Mus musculus
  source 1..687: mol_type = other DNA
tcttctatttattttttcttttattagaacaaaaggcagcttgagtattgctgtttgacaggcaggctgcctttgagaaagccgttcagtgcattaaattaaccgactcgggaaaagtatttcccctgtcaaacttttatgtttacttaaaaaaaaaaaaactccatccgtggcagccttgtgtgccaggagaggctcacctgtacacacaccacaggccgggagacctttgtcccgggggcctggggagggacgactttctggaggcttcgcagccacctgcactctgggaagccacacacagtgtggccctccggggtcgtcctggggcgagctttatgggcgttcccacctcgggggcggcgggtggccccacgctctggctgggatggggtgagccaccgctccggattcgatcagctctgggacaggcccagggtgaagcggccccgccgcgtccgcaccgccaccgtgaggccgtgccggggacggtgccccgtggaggtggcgctgccgcttcgcgctccccgcccgtctccccgccgccgctgccgccgcgccgggctgggctcgggcgggggcatccgctccggtctccccgcgctttcgcgctcccgcttcgcgtgcggcggctcgatccggggagggaaggccgaggggcggatcctgcctgggggctgatccctc

SEQ ID NO: 51427 - DNA, 369 bp, Mus musculus
  source 1..369: mol_type = other DNA
gttaggccagccattcaggatggtaaagctgagttctcaccctgacttcatcgattatagggaacgctgccaacggtagcagctactgtcatcttttcagttgtcttttcagacagctgtagttgtatacagcctgagctgcagctcaggaggcaggccttgatccggaagcatcaggccaggactgaggcatcctgctcaggcatctgctgtcacaagcatggcaggaggaagcctccctggcatggtgctcctgggacagtgacacgcgtgaggctccttgcaaagggattcctgctacctagcctggagccagggctctggtgcccgtgctagactgctgccattgccagctcaagaggaggacct

SEQ ID NO: 51428 - DNA, 179 bp, Mus musculus
  source 1..179: mol_type = other DNA
ggaggagttgccgccatcagatcggccgccatcagatcggcaatcttgattaatgattgatggaagaaggctcagcccactgtggtagtgactgggagcaaacctgcattggttcctctcgctttcatgatgaaccttaaactgtgaggtgtttttggtatgagttgctcctccccatt

SEQ ID NO: 51429 - DNA, 295 bp, Mus musculus
  source 1..295: mol_type = other DNA
attcaaggtccagccttgacagagagactgaaataggccttggcctcctttccaaatggcagagttgggaagcagaaagtcacagtcagtgtgtgtgtcagccacgcccagcaacctgagcctgggcaggtgccagtcacccgtgggctctgcaaggcttgcaaggctatgccgggtctggttgcgatgaaaagaactgtctggctccgtgcctgagggatcccacttgtacccaagtgagaccatgtggaggggaaaagctttgatctcttctccatcgagcaggaggcagctg

SEQ ID NO: 51430 - DNA, 398 bp, Mus musculus
  source 1..398: mol_type = other DNA
ttaagagcactgactgctctacatggtggctcacaaccataatgaaagacaccctcttcaggggggtctgaatggacttacatataataaataaatctaaaaaaaaaaaagcacatgattaaatttggccaaagtgttgtgtaaaggacattttcaaatatttatttgtgtgcatgagcattttgcttacataaatgtatgtgtatacctatccccttgaactggaattaaactgaacccaggttctctgcaagagcagccagtgcttttaatcactcttcagcccccctttgtcctctcctgggtagagagcttcctatctctgaagcaacctgggcgggaagcaacctggtggccagccctcctctctggttggctacctgtgagctcagctccag

SEQ ID NO: 51431 - DNA, 357 bp, Mus musculus
  source 1..357: mol_type = other DNA
catgggctgcggcgtcacatctctgaagccctgggttacaccagagcccttaaccctatgtgaatttcttaagaccacggagagatggagccttccacaggaagcaaggcaaccagctttctaatagtttgcttccaggtaacatgaaacctgtagaatcttgtttgctatcgcagattgttccgtgaaactcaagagtctgcagccttgggtgatggagcgcaagcggcggcggcgcgcgttactgggccgccctggcgaagagccccagttcccggccggccgggcaggcaggcgaggccccggcctatggcggagtccgcggcgggggcggggcgagccgcgcggccttcccgg

SEQ ID NO: 51432 - DNA, 266 bp, Mus musculus
  source 1..266: mol_type = other DNA
taagaaacttcaaatcaactaaaatagattaattcatctttattttaaaatttaattaaattaattaggcctttttctgtaccagagttaaagttcatctttttataaaacgttatcttcagagaaactgaagattccaggagcctggactacagaagatacatcttaaaatttcgaggccagcctggtctacaaagtgagttccaggacagccagggctatacagagaaaccggaggagctgcctctattcaggagctccgacac

SEQ ID NO: 51433 - DNA, 320 bp, Mus musculus
  source 1..320: mol_type = other DNA
ccaggacggccaggaggagggagctctcttctcgcttgctcccagaggactccttttaaaactttctaatcgctcagttctcaagttgtgcacgtgagagatcacctcttatggcctctataattatttcaaaagaaaagcccgccccgctctgcactcgtagggcctcctcggaatgtgggcggggcgccgccgcgcacgcgcagtcccgctgcccggcgagcgccgctggcggggggcgcatgcgcagtctcagccgcggcggcccctctccacagtctgagggggtaccgggggagccttggcccctccgcgccgcc

SEQ ID NO: 51434 - DNA, 278 bp, Mus musculus
  source 1..278: mol_type = other DNA
acacctgctgtaatcccagcacaggccagcctggtctacaaagtgagttccaggacggccagggaggagggagctctcttctcgcttgctcccagaggactccttttaaaactttctaatcgctcagttctcaagttgtgcacgtgagagatcacctcttatggcctctataattatttcaaaagaaaagcccgccccgctctgcactcgtagggcctcctcggaatgtgggcggggcgccgccgcgcacgcgcagtcccgctgcccggcgagcgccg

SEQ ID NO: 51435 - DNA, 488 bp, Mus musculus
  source 1..488: mol_type = other DNA
actggttaatattttgacctttcttggaagcagaaacagcccagggagacccacaggtctggcagccagagcaaagcccttacaaaggccgcaggtgcccctcctagcatctgcatggcggagctgcgtcgcatttgccgcgcgcgcggtttgggcgaggcgggaaagcgaaagttgagcaaactttgcaggctctaccctgcatcggggcgcagaccgggcaccgtggggtaccagttaagtcgcccaagctcggtgaccttggaagcagcgacccgagcccgcggctgcagccgccatcgcccgggattaatggcggcagagtctgcggctgcagcctaagggggcgtctgcgcggctcgcggggatggccgggccgagcgccgcatctgcgggacaagccggcacgcggcgacgagctcgcgccaccgcgcgtaccccacccacctgacggaacggccggcgcgcgctcccagtaaccgcggttc

SEQ ID NO: 51436 - DNA, 260 bp, Mus musculus
  source 1..260: mol_type = other DNA
cagacaccccagaaataggtatcagatcctattatggatggttcagaaacgtggttgctgggattcgaactcagtccctggaagagctcagtgctcttattcttgtgtgtcgacatacactggaacttctgaggctcaaacagggcttgccaaccttggcggcaagctcctggcagatttctgagttctaggccagcctggtctacaaagtgagttcccatgagcacatggtgacctggggcagccggcaggcttagctt

SEQ ID NO: 51437 - DNA, 290 bp, Mus musculus
  source 1..290: mol_type = other DNA
gagaactggactcaatctcccctaaacaggcttttgctatcatactcaaatgatcaatttatttatatttgaaacagtgtcacatatttcaagttggttatggggccctggagctccaacccagggcttcacttccatttactaatatcagtgatctggaaaagagttagtccttcccacagttggtcagggacagaccggggaggggagggcgcgccctcttaacgcgcgccggttctagggcgcgcagccctgcctctgagggggcggggcctgggccgacgctatga

SEQ ID NO: 51438 - DNA, 537 bp, Mus musculus
  source 1..537: mol_type = other DNA
gggctctgagcctggtatgcaaagcccaggggccagccacttggtctagtggaggaagcttccagacagacccgggggttggcaggctgatcgccgcctccccaaaaggaggtggagggtggagggcttagaccctccggtggcggtgcgccccccagcacgcagaccccggctggacaagtggggtgggggaacttgcgcagagggcggcgcgcgccctgggaccgtctctggctgtcgccagccctgtcccccggagccgcgtccccacgcctgccacgcgcgtgcacacacacgcgccccgcgcagaccccgccctggccccgccccggcccctgcgggcggcccctccggcgcccgcggaccccgcacgctgcgcgcgcctggcgggaggcgctggcggcgactcagggtacatttgtcccgcagtccagggcaccccggagccagaggacgtggcgctgcgccccaagcccgaggcggctcagtcccgccccctcaggggacccctccccgctgcgcctgggttccctcgcc

SEQ ID NO: 51439 - DNA, 441 bp, Mus musculus
  source 1..441: mol_type = other DNA
aagtcttgtaaatattttcctacttctttgttgttaattatgggatgttcaatataaaatatacatttccctgctcactgaacttggagagagctatttgggctaactggatggctagccacgcaagtgcatatctacctggcatgcatgggtcctagggacctaaattcaaggcaagccgtctactaactggcctgagaagagaccttgtacaggcccctgcctctgccgctccagcgctgggggcgtgcagcggagtctcagttttctccgctgaaaaacgggactcctgtcatccacaggtctgggaggaaattctccagccctcctcagagtgaagaaggttggcgccaaaagaccaatcactgttccggagcgtggcgcgaatcgcccctggagaatctcttcccagcctagaaagaaggatccttcgtcattgcc

SEQ ID NO: 51440 - DNA, 454 bp, Mus musculus
  source 1..454: mol_type = other DNA
caggcttaaagctttttcccaaagaatttgagttcagttcccagaatctatatcattctgctgtaagtccagttccatgggatccggtgcctctgaagacacttatgtgcatggagaagacaaacagttgctgactgccactccctatttgtgagagagcagtcagttaaccagctccataaacctgtttggctggtttcatgttacaatatataattcttgaagcagtttgtgcttagtgaattgagtcaatgagtccggacccctaaaaaaatttttttattattattattattgttgttattaatattttgagacttctacgactgagaaggcgcagtagtgccccgcgccccgcgccccgcgacctcgccagatctgtttcggaacctggggtccagccctggccggcggcgcgagaaccacttccgggtcgcgctgccggaagcaggaa

SEQ ID NO: 51441 - DNA, 288 bp, Mus musculus
  source 1..288: mol_type = other DNA
atagtgtcttcagaccttctggaagagcagtcagtgctcttaactgctgagtttttaataattacacgctgccagggattccatgtggcatgtcctctagagaacatctttttaaaaacaaggataggaacaccatctatacatgcatctaccatctgtagatcatctacaaatgagtttcacatacattaagtaaataaatataattgcggcctgggctggagagacagctcagcaatcaagggcgcctgctgctcttgcagaggactgttgctgtcatgacccttg

SEQ ID NO: 51442 - DNA, 458 bp, Mus musculus
  source 1..458: mol_type = other DNA
gctgccaggattccatgtggcatgtcctctagagaacatctttttaaaaacaaggataggaacaccatctatacatgcatctaccatctgtagatcatctacaaatgagtttcacatacattaagtaaataaatataattgcggcctgggctggagagacagctcagcaatcaagggcgcctgctgctcttgcagaggactgttgctgtcatgacccttggtcctctgcacttagtagtgactgaatgccacagcacagcgctgcagctgcttctgggtcccctgaggatctgtccccctcaggagggaaggagccaaggactccaggggagtggattctgctctggtccagacccaaggcacccagccctcctggagacattgtgtgagccgggctgggcctccagacacagcccctgctgccccaccccagccagggtggtgcttgtgtgggaagg

SEQ ID NO: 51443 - DNA, 245 bp, Mus musculus
  source 1..245: mol_type = other DNA
gccccccacctacacataattccctgtggggttagcgtggtgtggagtcctggatccactgctggtactaagtaggtcctaagtagttcctcctccaaagggtacctgggatgtgctcctgggggatctttaggattctagagcagccatggcttctggggctctaagggaccaggctcagggctaggggcctttgccttttcctggccttgctttgccactggtcaaatgaggaggagccagct

SEQ ID NO: 51444 - DNA, 262 bp, Mus musculus
  source 1..262: mol_type = other DNA
agcccatcccattccccattgtgggtgtaaataaaaagaaaggaaaagtctattttttttccaccatgtgaggataaagccctgggcttcccgcattaaaatttccatcagcagtaattggatatccaggaagctgctcatcccaggatccggctccagaaacgtcctgtgaccactgttgccacagcccgtgccttctctaacatcccacagcaaggagagtttgacaggctcctcccacagtagggagtgctggcctctc

SEQ ID NO: 51445 - DNA, 148 bp, Mus musculus
  source 1..148: mol_type = other DNA
ccaggccccggggagggagctgcccaaggtgccggcctggaagcctctggcggcctcggctccggccggccgcctggctcagagctggcaggggtggggcggatttcgagctggttgaacgaacctgcaaggaatttattaaattcca

SEQ ID NO: 51446 - DNA, 546 bp, Mus musculus
  source 1..546: mol_type = other DNA
gaaaaatcatcacttctccgggatgccagaaggaataacttattcacagagtaaggtcaggcttgagaattccccctctctcctatcagaacccctttgggagtccaagggggaaccaaggccatggggccaccaagtcggaagcggtctgcaggtggccctccacgggccaggctcctctgattgacagctgcgcctgggccagccctccggcctcgggggtaccccaagacggagggattcagggaccaggatctggaaggctttgggtctcggcggccatctctccggcccgggggaaggcctggtcggtgggtcacgggggggccccgcgacaggcccccgggaccccgcaatctgagggccagcccaggccgcttccccgccgccggtcacccgctcccagctcctgggggcgccatcttggatgtgggcactccccccgcccaacaccgttgccattggtgggctgagcaggccggtgggcggaccaatgaggatcccggatcctgcgggccgctgaaggcccgcggcaacgtcaggggc

SEQ ID NO: 51447 - DNA, 373 bp, Mus musculus
  source 1..373: mol_type = other DNA
tcctgctccagccatggggggccgagtgccgccctggggcccctccagcgtgggatgccagagactgagaacctggtaccaggagctgccccttgtccaccccctgccatgcggggtcagtggcttcacacagccagatgcccatccggggccgagtggaaagtgtctggcagtcccccatctgcccgcccagtggggcgggaccaattggcccactatagaggccagcggctgggcagggagatctccacagagccccctgcaaggttcacactgcagggaagagtaactcccttgtcactcgggcttcctaggtgcctgcctggccagagctggaaagctcccagcaggtcagccaggcttggggagcctg

SEQ ID NO: 51448 - DNA, 417 bp, Mus musculus
  source 1..417: mol_type = other DNA
aatatttagaaaccgtagaaaacatgctaaaattagatctcattttgagtcaaaattagattgaaaaatgaatctatagatggaagatttatatacatccttcatcttcctgattgttgccatggggatgaacaacgaaaatgctacttggaggataaattagtatttcctaagcatgacttctcagtatctggatcctcataaccagaaaggtaaccaccctggggggacattaaaaaatgttcattattacatgaggccttcctttaaagactaatgtatacagcagtacctggttctctgcctccggggagtaggaactgcccctgacgttgccgcgggccttcagcggcccgcaggatccgggatcctcattggtccgcccaccggcctgctcagcccaccaatggcaacggt

SEQ ID NO: 51449 - DNA, 501 bp, Mus musculus
  source 1..501: mol_type = other DNA
gctctcctgacctgggagtgggtgaggaggaagtgccccctccactttctcaccaccccagctgtactgttaaccacagatgtgggcacagcttttgaaagcctggtgggtggttagatgctaataaaacgtgaataaaaaacccatatgtatttatgtatatggttgtgttgttgtgatgacagaatactcacagccgggtacattctccagacagtgggacaccattgtctctgtgaagacaaggtctgccttgctacagggtctgcttgtggccctcaggggagacgcatgcactccctcgagtaaaggcagtgccaccctgggctccagccctgagctttgccctccaaagcacagcaagctctgctctgagagcaagggagaaagcctggcctggcctggctgtgccctgctctgtggatggcagggcttgtgccaagcagaggacagctcctgatcgtcggatgtctccctccgtgtgccagagatcgggtcctc

SEQ ID NO: 51450 - DNA, 370 bp, Mus musculus
  source 1..370: mol_type = other DNA
catctctacagatttgcctggtataatttttaaagattcagaaacaaaattgatcagacttttctaaatcactcaaaagtgtggttatggccgtcatcaccgtgttataacacctattatactcacgaacccaaggaaagagagtgtttctgttgtttactataatttttaatctataacttttaagtgtttattactctgcgcgcacacaggcgcgcgcgcacacccacacccacccgctagggtgcgcatgtgaagcctgagcagtcctaaaatctatgctttagtttaggattttgcgcctcccgctgcgcacgcgcactgcccgccttcccaggcctggggcgggcccgcgctctcaacgcggtcg

SEQ ID NO: 51451 - DNA, 563 bp, Mus musculus
  source 1..563: mol_type = other DNA
cttaaatctatataatgacgatactgtagtaagctaccaaactaggaaacactttctaggataagtcagggtcttacaatatatcccttggcttcgaactcacagagatatgcctgtctctgctttctgagtagaatactttcattgctaaaactattttgggcaaaaattcgtctaaatttcaaccatttaattgttatcactctgcttctgaaaagaaaaaaaaagcaatgtttgcttgttgctcctctgcctgagacagccccaccggtggtaataaataataaagactccacatgatttattaagacatcttgggagttttccttcttcaggtaatccataacaagatgaataaactgaggtgaagtagatttcccttctttagtagacaaggccttccgcgcaggcgcctcgggtcctgcgcgctgtgcgacctgggcagttccccagggccaagcctgagcccagcgggggcggggctggcgggctcgtgacgttatcaagcggcgccgcccgcggggcgggttccgagcgcgaccgcgcagctagccggccctgcg

SEQ ID NO: 51452 - DNA, 251 bp, Mus musculus
  source 1..251: mol_type = other DNA
ctcagcgatgagctttccagtaggctcacctacttaggaaatccacaggttcatcctcgggctggaaatacggaaaccggtttcaaggggaaatattttgaaataagttgaactggctctgattttcatagacaatattgagtatcagttcatagtcaaaacaacacatggtcttaaaactatatgggaactctgtagaccaggctggcctccaactcagtaaataattgaatttaagacatacacatgtc

SEQ ID NO: 51453 - DNA, 394 bp, Mus musculus
  source 1..394: mol_type = other DNA
ggtcagacagtggtgacagggctctccgagccccggcctccaggggtggacaaggaggccgcccttctgccctcggggctggccctggaggagactccggatgggaagctgcggctggagagtgtgagccgcgacatgagcggcacctaccgctgcgggaggctcaggtgcagctgacagtgcactgtgagaagcacagggaagtaatttgcttcagtttgcactcaaggggacccactgatgcacgaccagaggcccagaggcccagaggcctattggcccagtcgaccctgagctcctcccaggccaaggtcacgggacaggcccagttcctccagaggtggagcccagttcccaggacgtgcgccaggcgctgggccggcctgtgctcctg

SEQ ID NO: 51454 - DNA, 275 bp, Mus musculus
  source 1..275: mol_type = other DNA
catatgtagcagaagatggcctagtcggccatctttatatgccccagtacaggatagcatttgaaatgtaaattttaaaaatatctaattaaaaaaatgaaaaagaacctaggaatctcaggatgtctgcaggctgttctttgggactgaagggccagggcttgcaggctgagccttaggtctccactcacggggcgacgcagaagtcccgcctccttcctctgcaccgaccaatgaaaaagaagcacgaggtcctgcgcgtgcgtagtgcgact

SEQ ID NO: 51455 - DNA, 535 bp, Mus musculus
  source 1..535: mol_type = other DNA
cctgaaattcatttatggcaacgcttcgcggcactcatcaggggcgcgagaacagtggccttgaactaattgggcccccggcccgcttggggcgtaccatttgtctcagctggggggtggaggcaaagctcccccacaggaggaactcgggaggagcacgcaccgcccagcctccgaggcggatcccagctgatccgtcgggctccggcggcggcggtggctcccccgggcgagaccatcgcgccgcctcgggaggggtgtccgcctcggggagggggcggagcggccattgtccggtcagcgcagtcggagcgagcgggggcccggggcgtcacagccggccgctgcgactccactgccggcgggggctacgggttcctccccacccagccccggacccgccagcgccgccgcacgggacagcgccgtggctggggggcggcggagagagccgccaaggccgccagatctccccggctcgcccgcgccccccccctccgcaggccgagtggtgcggcccgcctccagctgaccc

SEQ ID NO: 51456 - DNA, 462 bp, Mus musculus
  source 1..462: mol_type = other DNA
gtctaggttgtggctctgatccttcactgggtctttgcttggaattaagtctcacacacccaggtaagtaactttcaagagtgacgaatgtgaaagatggagtctaaagttgacacctttctagcgcaggcaagtcgggtatccgtcttcccactgacagaaggacctagtgacgcgaccgatgtgacgtgtgatgacgtgcctcaccctgagccaggtgtcggcagggcggccacaccctcagggcccagtactggaggggcagtggcaacacgccgcaagacccccgcctgaggcgacctggggccctggcgtcctgggttctactggcccacggttgagccgttgctaagtgacgccagcgcgcagagcgcgtgcgcggccacggcggtgtgcgtgaaagcgggcgcgcgccgcgacggcggcggcgaggaaggcggcgacggcggcggtcgagggggc

SEQ ID NO: 51457 - DNA, 431 bp, Mus musculus
  source 1..431: mol_type = other DNA
attcaccaagaaccaaagcttctttaattatttttaagactgagtcacagaagcccattgttggccttgaactcatttaaaagctaattttagataagcatcagttttgtctacacacatactctgtgtgtagaagtgagtcaagaggctctgggaagaaacaaaatcctaaattcgaatggttttcaattatcctggcttcaggttcttatacaatttttaaaaagattaacacccagttcaagttaaatttccaccaggctgaaattttcgtaattataagcaaaatcaggttcctaacacttttttttttttttgccactattgtgcacaatggcattctggaaaatgtagtgacagccaacagccatgtgcaccgtggttggctgggagccgcgtccgcccgccccttggcctgtcactcagccgac

SEQ ID NO: 51458 - DNA, 249 bp, Mus musculus
  source 1..249: mol_type = other DNA
cagctagctcagcaatttaggtgtgtgtgttcctgcaagcaagggcaaatacgtgcacgcgcctgtgaaggccagaagagcctcaacggtcttcacttgtacataagcacctgacaggatcccggcacttcccaggtggtagctcactcactcgcctgcctgtaaactggtgggaggctgtctcccaacagtggctgctctggtagagctgcccccagtctctgctgccactcggggcgcagccgttga

SEQ ID NO: 51459 - DNA, 454 bp, Mus musculus
  source 1..454: mol_type = other DNA
atggtccagactagccctaggcaggtccagggctgagctagttcatggtggggggggggtgcatcctctcccgacctgtactgcagttcaccctgcaatttctaaagttttagatagaaaggacctgctgtgcaggcccagaaggcttggggaagtaggtggcacccaactagtccgatctcttgtgggatactttccagagggaggcgggctccactggtcgcagcgagctggccaggcgcaggcaccacaggcgctcagagctagaagctccgctcctgcggctcttaaacctgagtggagcccgcggggagcacagcgccgaacatctcctggcccgggacgctggaggccggtctggccccgggcctcctgaaacccaggcggaagaggacagggaccccgcccgatccctcctgcggacgggcggggcggccccacgccagctcctccc

SEQ ID NO: 51460 - DNA, 521 bp, Mus musculus
  source 1..521: mol_type = other DNA
tcatatttataataaaaattttattttcgagagcacctgactgctcttctgaagaccacatggtggctcacaattgggcatacatgtgggtagaacactcatataaataaataaataaataaataaataaataaataaataaatccttttttctttttaaattattattttctttatttacatttcaaacttggttatgggtgtcaaacaatagatcctgtatttaaaactggatcgagtctgaggttttaacacatttatgtaattccattatacaaatataacactatgcagtttccggaaatgcaaagtccacagaaaacattgttaacagtttgcacagctctaaagatttctagaatgctctcaagatactggaacatgattgaattcaaagtttcagttcatcaactgcataggtgagttacctgacccatagcgaggcacccgaggcacccgaggcacccgcgggcgcgcagcatcttgcaggagccagcgcgtgaggcgcctcgcccaacttc

SEQ ID NO: 51461 - DNA, 332 bp, Mus musculus
  source 1..332: mol_type = other DNA
cataaccttctagagagaagcttagccccagcacacccaagtgttggagcgggtggctcacaaaagccctggggctgttttctacgtctggcttgaacaaaggagccacctgccttctttacctcgggaggtttccgaaacaaggaccccgtggttgagctggcccagctcctgcagggtccctgaagtgggcttcccaggcccaggcggttgggagaggcctagcttcgggtccagagcatcctccagccgctcgcacctgtcggcgccccgccccctccgcccggcccaatcgtgggcaggggcggggccggggcgcagtcggaacccgc

SEQ ID NO: 51462 - DNA, 517 bp, Mus musculus
  source 1..517: mol_type = other DNA
tgaagatctgtatagcactggctgctcttccagcagacccagtggctcccaactgtctgtaactccagatctagaggatcttgcatgctcatgcacacatgtggtacaaatttttaaaaatctgctcaggtctagagggactttatatttttttatttaaaaaaacaaatatattagtatctttatatatttatatgtatttaaattatatattttcaaatatataatttatatattatttttagtaaaatatattttattatagtaataaaatctattttgttttaataaatatataaatatatttattaagtatatttcattaaaatatatcgaataaatatttcagctattaaagtgtagttttctagaaagtgcaaagctagagtttccaccttcacaagtgacctagcctgtggctctgtccagccagtggccttgatcacagagtctgcttctagactaggtgtacacattgattcagcttaggactggggaggagtcttctgaaatctca

SEQ ID NO: 51463 - DNA, 163 bp, Mus musculus
  source 1..163: mol_type = other DNA
gggccaaggcttttaaattctgtatccgagtcatggaccttcagggatgaagaaagctgcctgccccatgacggcgattcaaatatttaaaaacacgaggctaatcccttcctgggtgtgaccctacgacccagcctgacccagcccatgtccggaggggttt

SEQ ID NO: 51464 - DNA, 260 bp, Mus musculus
  source 1..260: mol_type = other DNA
gtgtacttacatataataaataaataaatagtaaatggctgacatttttctcaagtgctggccagtggcagctggattggctcagctacaatggactaggccagtcgatagctgcagccaacttctcagaagcagctcccttggctaattaacttgcttggcatgcctcatcatcaggttaggcaaggcctcctggtggcttcaggccagtatgttaatgatttgcacggttgcagcaacaatgcacccggtaaaagcag

SEQ ID NO: 51465 - DNA, 197 bp, Mus musculus
  source 1..197: mol_type = other DNA
tgcagggcatcctctcagagactatgacccaggaggcagaatgcctttgtacagacatcagtgaggactctgagctcttgcaggttcctcagtaagggaccaaagagcaacttggtcattatgtggctctgtctgagcaggcgcccagctggaccactgtgtatcttacgagaggatggaccctcctttggcaaatg

SEQ ID NO: 51466 - DNA, 257 bp, Mus musculus
  source 1..257: mol_type = other DNA
ggatttggaaagttctggagcaggttttcctaacctgtattacaagaccgctgtacagaacccctctcagagctttgacaactgcacatgtctcctgacactgccaactgtcttaatgtttaaagttctcacttcaaaacaacaaaggtcaattaaatcttttttttaaaaaagtttttataagcaagcaggacagtgaataccagtgttcagtctgtagacaagagatcaaaaaaggcttgaggtttttcttcaca

SEQ ID NO: 51467 - DNA, 317 bp, Mus musculus
  source 1..317: mol_type = other DNA
agagacagtcagtgtgcaggctgggcctcgagagaaagctcaaaagtaacctgaattggtttgagatgttaaaccctgacccgggtcagcctgggagggtccttgcatccacgggggacccaagggattgaaaggcaaggcctagatttgagatacatctctcattccccaggccagtgacactgcccatgttaggaggccaggtctgcgtgggtaccaagtctgccaaggccccgcccaccccctcgtcctgggcggcgattggcagaaatgcccttccagttgctaggacactattcctgacgacgcgggacgcg

SEQ ID NO: 51468 - DNA, 294 bp, Mus musculus
  source 1..294: mol_type = other DNA
tgagtcccagggctacacagagaagccctgttttgactaggttatttttaaacagaatctagagacgatatctcaaattctttctatttcaacaattctcaaagtctgagcgctgagcaattggcctcagggtcctgtctcagcttcctcgggttgctggggtagtttggggcagctacagaaaacactagagtagatgtaagcgtccacttgaagggtagagtggccagagttccccggccacttctatatgagatgtggacacttctcaaaagcctgtagatagaggcagac

SEQ ID NO: 51469 - DNA, 336 bp, Mus musculus
  source 1..336: mol_type = other DNA
caggtgctgatctgcggcagggggctgagcggcaggactggctttggatgccaggccaggccgacacgtggagtcccggactttccaggatcaattcttggcagacacaggtgcggtaccaggcgtgtgcctggtaggccgagagaggccatcctcagtccaggactccggtccggtgaggtcccctaggagctagcgtttggctgctgggcaccatgccagtaagagcccggcgtcctgcggggcctacaggaacagctagaggatgctccagctgagcacatcccttgggcgcgcgcggggccggggtcagggggcgcgcgggacggaaagggc

SEQ ID NO: 51470 - DNA, 462 bp, Mus musculus
  source 1..462: mol_type = other DNA
ttttgcctgagcagtctaagtctgcagttttaagcaaggtggcgccttggcacttcacactcccaggcagtctctacaggagagttccctgtggcccctttctatttaaaagggcagggttaccctgaagcttggaggtcccgggctctcaggtggcatgcctccccgcagtgtgaccgtgaggagcggaacgcgcccctcctcctggctactgagctcagcctgggtgacgtgggcatctcaagatcttttttatttaatatgtaaactgtgtgtgcagtccccacagagacgctgaagtcacaggcattctgtgagtgctggaaattgaacctgggtcctttgctaaagcagcaagtgtttatattcaccctgcatggtttagagtaaaacaaaatgctgttaggtcctacggcacgacatgcctgaagcccttaggatctatttaatccactgggattc

SEQ ID NO: 51471 - DNA, 206 bp, Mus musculus
  source 1..206: mol_type = other DNA
taacttattgtctagccctggctatcctggaacttagaccaggctgcaggtaaaaatggagccaattgctgctttataagtggacactgatcagatcaaagagttttggaggttcacatccaacctataagtacgaattctgatgcgccctgcgcgcatgctcctggacggcacgccgttcgcgcggcgccgagtgacatcactga

SEQ ID NO: 51472 - DNA, 281 bp, Mus musculus
  source 1..281: mol_type = other DNA
atctaacagatagttgactgggcaaccttccctctgcttaaagggcaggaacggggctgcccggtcaactccaggtggagggaaacagccttcccggcccttccaggaatgcacaggctgcttggggaaggaactttccccactttcccagcactttgggccacagccacagctctcagcccaatgactgctgttaactgactggtgtcggaggccgcgagctgccagctctggttggctggccgcccccgcccctccccccgcccccgccctcccggcgc

SEQ ID NO: 51473 - DNA, 388 bp, Mus musculus
  source 1..388: mol_type = other DNA
atactgtaacacagctgtgcgagtatatatatatatatgtgtggggacaaatgacaggtacttttctttcttaattgttatatataagtatactgtagctattttatcagatctcactatagagggttatgagccactcctggaagagctgtcagtgctcttaatcgtttatctattgattacaaacaatctttacagttactctgtaaaagagcaggctgtctgctggtatggtaggtgggcacctctttcagcgggatctacccaggggaggaccccacgctttcccgaacccggaattggtggactcagttaggggcgtggccttaaggagccctcccagaatgcgcgcgcaaacgcttgggtccaccatggtgtggtgcgtgtg

SEQ ID NO: 51474 - DNA, 330 bp, Mus musculus
  source 1..330: mol_type = other DNA
agtttattctgtgcacttatccagtgctcatgattgtaaagcgagcactttcgattgctgttttttgagttatgaaaatacatggtttttttttttaattagctggggcatataaagtttgcaagtccaatgggcctccactaggccaagacaagagctcaggccctggcatagtctcacaagagagagctatatctgggtcctatagtattctgtcgcatggacgggacacatttttgtacctccattcatcagtgacttaggaaattgtaaacatccatttttttaaccttctgaaaggaacaaacccacagcagctggaacgttgtt

SEQ ID NO: 51475 - DNA, 475 bp, Mus musculus
  source 1..475: mol_type = other DNA
agcaagccacggggcccggggtacgctgctgcagatgatctggttaggcagagcaggaaacagaccgcagtctcaagcgctcagtccttcggtctttaaagacgaggcgccgctcgaggaggcgtggtctatagctctctgggccacgccccacggcgtggtcatgagcctctggggcggggcaggctgctactggcgcccgggctgggccgctgggtggggcctggctgagtgcgcgcagcggggcgggaccggcctctgccccgccccgcttgggccctcccgccccacccgccccgccccccgcccgccgtcgcgctgggcgggggcggggcccggggtcggcaggccccgcccccgcggtgaatattgatgcggcgcgcatcggcgtcgccctcctcccattgagcgaggctgtgtcgcgtggcccggcgtcggcgtgacggttggacgcgggcgcggcactgcgggtccc

SEQ ID NO: 51476 - DNA, 474 bp, Mus musculus
  source 1..474: mol_type = other DNA
agcttggcagcagacccagatctgcagtcccaggtctgaggtggcagggggccggagagatggagagagacacctcccccctccccgcttcactcaaacttgagatattggggagtgacaccactgacccaggcctctcaggccagttgcttggaagaaggtccctcgagcctgccaagctaggaagctccacgtcctcgagaggatcgggtcctgggaaacgaggttccctgacactgccaggctgtgccgcaaggtacagacctttgggcacagacctggggcccctccgtgtcgtgtgcctcacgacaaacacgtgttagacggcagaacttctcaccccgctgtggaggcccggcgtccagccgagcttggcggagccagagccgttctgcggcccaggattggcgggtgtcggccctccgccccccggcgccgggccaatcgccgaagccgctgggttggtctagaccc

SEQ ID NO: 51477 - DNA, 399 bp, Mus musculus
  source 1..399: mol_type = other DNA
cagaagttcaaggtcatctgtagctgtacatagtagctatgctaatgtctccaaataagagataatggtctggtggacctgatcgggtcattcatcctggttccagtaaccaggttaactagtgagaggtggctctcccgcagcctgggtctctgcctgggcggtcccagcggcgggagcgggaaacagcggtgctgagcacgcgcggagcggctgtccacagccttgcgcgggacccgcccgggcgccaaggagtgcgcaggcgccagggtaggggcggagcctcctcatgctcttcgtcccgcccccgcgctggcagcacctttcccaattggacagagtcgctacgacgcgtcgtcgcgtcgggtgacgtctccggagggacgtcggcgtagtcgg

SEQ ID NO: 51478 - DNA, 526 bp, Mus musculus
  source 1..526: mol_type = other DNA
atctgttgtctggaagcagcttggggacaccccacctatcagccctgagtagtggctgggcacgcgtcgctgtcccaggacaccactgctggaccaggcggcccttgaagcaggatctctctttctataacaaaagtaagtggcgttctggccggcccgcagccactgctggcggcacatcgagtgcccagcatagcagactgatcagtctagggccatcagcccctgctgagtccgaagcgagcactgagcacccaaagggcagggggtgggctacagcagtgtcgcccatgcccggcagggggcgccagcagtctcgggcggttgctgagccgggcccctgacgtcaccgcccgcggtcgccatggcgacggcctcaccagcgcgcgcgtcagagcctcccctcggcaggcaccgggccgcgcgtcgctctggcgtcaaaacgacgggctgtgcctgccgcggggggcggggcgaggcggggtgcggggcggggccggggcggggcggggcgttgccgcgtgcg

SEQ ID NO: 51479 - DNA, 301 bp, Mus musculus
  source 1..301: mol_type = other DNA
gcagagagggtttctctgtataaccctggctgtcctggaactcactttgtaggccaggctgacctcgaactcagaggaccaccagtccagggatggccccgcccataataggtggggtcctccccatcaggcttacaggcctcaatctgattttatagagaagctcgtgtcaagttgatttaacaattgtgcaaatctaaaactctacgttatcaaacatgagaattattagattagtatattcttccaagctttgtggcacagaagcacttggggccaagaaatcgtcgagatttgaacc

SEQ ID NO: 51480 - DNA, 334 bp, Mus musculus
  source 1..334: mol_type = other DNA
tctctataaaatcagattgaggcctgtaagcctgatggggaggaccccacctattatgggcggggccatccctggactggtggtcctctgagttcgaggtcagcctggcctacaaagtgagttccaggacagccagggttatacagagaaaccctctctgctttggtgaaaatctcactacccactgcttagaactgtgtgttttgaatgcttacagagtcaagttagatcctacgtcgtgtgtgtggatttgctgattccccattcaacatccacctttgcttgtgacattgggaggttggcctcgtcagccttgggctgcctggatgacggc

SEQ ID NO: 51481 - DNA, 385 bp, Mus musculus
  source 1..385: mol_type = other DNA
agtttctggaacgccaggaaacctctccttgacattttcaagtcaaaggtctttgaggtcctcagacaattagtcccggctgaggagcagagtcctctccagactcgcctatgaccggcagggtgtttgttctgagtgaggaaaacagaaacaccaaaggatgttctgctttgaagatctctggaggtttcggagctctgcagatggcagtgatgtcccttggctcaaaggataaggctctccacagaccttcttggagacatctggtctgagagcctctgctgctcagcggcgctgctgacggtgcagcctctcccccgagctgagcatagacattttgggaaatcccttaattcctccattctgtgcaggcatatatagggag

SEQ ID NO: 51482 - DNA, 293 bp, Mus musculus
  source 1..293: mol_type = other DNA
caagctaggcctctgagttcaaggccagcttggttcatgagaccctgtctccaggatgttctagagtatctgaagacagctacagtgtacttacatataataaataaacaaataaataaatctttttttttaaaagaaatgtttagcacatacgtagtatccagtaaagataaattcctcaagcaatgggaacgttcctttcccttcagagcagatctttcaaatccattcccatgagtgactctgagcagacttgagcctaggacacgtgactcttgactccgggtagtctg

SEQ ID NO: 51483 - DNA, 217 bp, Mus musculus
  source 1..217: mol_type = other DNA
gagcctttgcagcacataaggtgtgtgtgtgtgtgtgcgcgcgcgtgcgtgcaagcattcgagcacagtgtgtaaatggccagtgtccccatgaaacttcacacccacccgcagaggtctgcaagtcccaggctggtcggaccccaggaggccgggcagggggcgggggcgctcagagccggccccggggcggggcgagccgcccaggcctgggggc

SEQ ID NO: 51484 - DNA, 319 bp, Mus musculus
  source 1..319: mol_type = other DNA
tttggtgaaaatctcactacccactgcttagaactgtgtgttttgaatgcttacagagtcaagttagatcctacgtcgtgtgtgtggatttgctgattccccattcaacatccacctttgcttgtgacattgggaggttggcctcgtcagccttgggctgcctggatgacggccttcctcctgggtctcaagtctgtatcaaaccagccgtaggcgttctgctggaggagaccttgaacctgggccacgtctacccgcacaggggccacgcgggctccctgggcgcgcggcgagcggcgcaccggtgacgccatcaccc

SEQ ID NO: 51485 - DNA, 72 bp, Mus musculus
  source 1..72: mol_type = other DNA
tcgttcttgggtctagattctaccccaatcaaagttagatgggcaggtgtgctgccaagtgctcttaaattt

SEQ ID NO: 51486 - DNA, 738 bp, Mus musculus
  source 1..738: mol_type = other DNA
ctgggggaaaaaaaaaaatcttttcttgtcgttcttgcaccctctggggtacacagtcctcagagaccggacctcctccccccagtcgggggagccatccggacctgggaggaccagcgggacgcgcacgccgggcggcggcgatgacacggggccgcgcgcgcagcgtgcgtggtgacatcagtgcgctggcggcggcggcagggctgtttgttctgctctcccgcagccgaggaaccgaagcagtggcggcggctgcggcggaggctgccagcagtgcccgcgggcgagcggggcctgtgagcgcagcggcgcggcgggcgcggcggacgggccccggcttggcgtcccggacagcgtgcggcggcgtgcggcctagcgtctcaggtgaggggaccggtgtccttcgcggccgcgaggcgggctgccggggccccacggcgcggcccgcgtaacctgcattgcgtaatggggctggtgcgccaccacctacgccatcggcgcgggggtggggaggccgcagtttcgtgggcccggagcctggtgcttctcgcgccctgccggggcagcccgcgccgttggggcggcggcggccgagtgggctcgcgggtaccggggcagttgcgcccgccgctgtcccccttggcgcgggcggcggcagggaacgggaccgggaccgggaccgggggcgcgggcgcgctgggcggccgggggcgggcggggggcgggccaagctcc

SEQ ID NO: 51487 - DNA, 455 bp, Mus musculus
  source 1..455: mol_type = other DNA
aacccctcaaatagagtatggacttacgtcttcaagaattaaagttaatctggaggagatccttatgaagggtaagaattcttaagatcctgctctgaaaaaaaaaatccccgctggctcattctcttatttcatgatacatgaaatattttccttaagttgattccataaattgagtgtagtgaatatagtgaaacgtgtctgtattttcagcaattgtcagttcccactgacatttaaatttttggattaaaaatcttagagcgcttgcctagcaagcgcaaggccctgggctgggggaaaaaaaaaaatcttttcttgtcgttcttgcaccctctggggtacacagtcctcagagaccggacctcctccccccagtcgggggagccatccggacctgggaggaccagcgggacgcgcacgccgggcggcggcgatgacacggggccgcgcgc

SEQ ID NO: 51488 - DNA, 480 bp, Mus musculus
  source 1..480: mol_type = other DNA
gactgactggaataaggtcacttacagacactaggactagtcctagagcagcctcaccagccctgtctgggcgaaagcactgtcctagtcctgacctttgtacagagggcgtgccggcacagccccccgtgcccctggagcccgccccagcgccaccaccagaagaggaggagagccctgtacccttgctgggcggagcgctgcaatccgcgggatcccgggcctcgacatggaagacgacgaggagggcggtgggggtccataacccttacccggcagggctcccgtggccgaggctggaagtccagcggcgggcccctagaagtgcgcctgcgcgcgggtaaacgcgctagaaccgctcacgcgtgcgcggacctggacgctcttgcgcacctcccgagatgctgtagatttgcggggcgggcccatttgagcaaccaatgacgctcttcgtcttccagtagcagacagcacgttgaa

SEQ ID NO: 51489 - DNA, 358 bp, Mus musculus
  source 1..358: mol_type = other DNA
aaatagcatacacataaacagttatttttaaagtggtttttggagcactagctgtttaatacacataaaattttcaaaagcatctttattttgcagttggagaggccttctgtacatgctaggataaaatgtttttccaccaagctatatccttacaaacactattaattgttatgtaacgattaataagaaaataatatttactatttactttgtgaatcactggaacccagagtggcttagaattcatatagtataatctgacctcaaactcgagtctctggaacgttatctcacataacgtgctcgcacacaccaggcgagcacacgcgtgggctcggacctctaggttgcatgc

SEQ ID NO: 51490 - DNA, 236 bp, Mus musculus
  source 1..236: mol_type = other DNA
ataaagttttttataccatctttattatccaacacaaaacatagaacataaggcccagagagatatttctctctgcttattaactggggcaataagcagcttcctaaaaagctgctgacccaagcagaaccagcgttgggttagcactgattcaagcttaattcgacagttctggcgccaaaatgttgcggccgccagcagctcgcaacgtgaacgggaggggacccgattcccgc

SEQ ID NO: 51491 - DNA, 491 bp, Mus musculus
  source 1..491: mol_type = other DNA
agaaaactttattaacaaacctacatgttattaacaaacctagtatgttgtcggcggccccacccccaaagtggcacaagggggggcagacctcctcatcatggcggcgcggcggggctgtcgcgctgaggtcacgtcggcacgccggggtcccccgagctgtggaggcagcggtggctgcggaggccgtggcaccggcaccaagaggggcagcagctgtagtggcagcgacggccctatgaagtaggggagttcccggccagcgactacgcctcccccggtgaggctcgacccagcccgggaagctcgcggacggggcggagctggagcagggaggggaggcctgggcccggtcgggccgggcgggaccccctggggcgggggaggggcggggcctgcaggggcggggcctgcagggggcggaggatcgggggtctcgaggcaggtgtctccccccccacctcagctcgtcccgcggggtctcccgcccc

SEQ ID NO: 51492 - DNA, 289 bp, Mus musculus
  source 1..289: mol_type = other DNA
caaaatggatatatttacttagagaaggctaataggaaattaatacttgaactaaatgagtaatcaaactcctgtcaccatttggtgatgacaaatatgcaactaatcccttgactgtggatagagaagcaatggactaagaaaactttattaacaaacctacatgttattaacaaacctagtatgttgtcggcggccccacccccaaagtggcacaagggggggcagacctcctcatcatggcggcgcggcggggctgtcgcgctgaggtcacgtcggcacgccgggg

SEQ ID NO: 51493 - DNA, 269 bp, Mus musculus
  source 1..269: mol_type = other DNA
attagttaaagaatttattcattttcgtcagtggacacctggggtctatggagtccttaggttttagttctagagtccaaggccagcctgggctacaacacatgccgtgagctcaaggcccggtctgtagagcataggccttgcacccaggccctaggttccactcccaaggtggaatctcacacaaaggtgggagagaactgagactttagggggccttgctactccatcatgccctcccagcctgactgtaaaggggggggggcggg

SEQ ID NO: 51494 - DNA, 294 bp, Mus musculus
  source 1..294: mol_type = other DNA
tcctggcttgcattccttttcttaaagaggggaaaacccgtctgtctgagacataaatgaggtgattgcatgaccatagcaactcttatcaaggaaagcatttcattggggcagcaagaagagagagccactgtgcctggcttgggcttctgaaaccctaaagcccactcccagatgggagcaaatgctaacctggccaggcctctatcctgtttatagtggactccatcatccaggcccttgctgaacttgagcaaaaggtaccagtgactgaggccagcatcactgcctctg

SEQ ID NO: 51495 - DNA, 449 bp, Mus musculus
  source 1..449: mol_type = other DNA
tgcctttattatattcaaatctggcttggattggctttgcctatcgtgtgtgtgtgtgtgtgtgtgtgtgtgtacagacacacatacacacacacactttaccatgttggcctcagactcagagatccacctgtctctgactcctgagaagtcatgggccaccactgcctggtttaaacacagactcattaaagtcttttaaaacatattttagaatacataaaataagataaaataaataaaattggactttaactcactaaagtctttttaaaaatattttagaacaaataaaataagataaaatgtaataaataaataaataaataaataaataaataaataaataaataaatggaatcccaattctgcaaaataataataataattgattataattttacatttctggagtgtgaacttcccagtctacgagaccagataacctt

SEQ ID NO: 51496 - DNA, 416 bp, Mus musculus
  source 1..416: mol_type = other DNA
aaccagagcccttctctttgtttggaggcatcttcagaagccaggcatcgtggctcccaaatccttagcttgctaaggcagaaagtgctacgtaagcatgagagcctgagttagagatcccgggaaccagggagcctgacccaagcaatgatctcctggttcagggaggaaccctgtgggtagaggaaaatactgatattctcctctcaccataaatgaatgtgcctacatggtatatgcagtcatgttcacacaccatgcacacatgaacacgcatacatacgcatacacatgcatgcatgcgcacacacacacactgactttcacagtcctgtgcgaggaagaggaagaccccaacctctccagcatcctgttggggggagggatgtgctctgcttgctagaatgtagaaggta

SEQ ID NO: 51497 - DNA, 440 bp, Mus musculus
  source 1..440: mol_type = other DNA
tcctagggatgaactcaggtttttccttagaaaaattttattattcttatttaaagatttgtttttttatcatgtatccacctgtgtgaagatgtatacacatggatgcagagcctctggctccttcaatctcctggactggaagcagctgtgaacaagtgttttacatctcttctatctatctatctatctatctatctatctatctatctatctatctatctatctatctatggtttccttagtcctccggcccaggagacaagtagccctccgccctggggctgatggagtctgagaactcttgagaggccccaaagaatactcctgtggagcaagccagacttgcaagcaaccgggcaggggcgttgccagtatgggcgtggccccggagttgtgaggcggggctcagcgctcagcccgaagcttgtaaagggctg

SEQ ID NO: 51498 - DNA, 189 bp, Mus musculus
  source 1..189: mol_type = other DNA
ctttgttctatttttaccgctgatagttaaaaaaaatgtccttctttatgacagacagcttttctggatgcagcaatgaataaacctggattacttggagggagaattctgccaggttgtttcagtgccctctagcctgcaggtcctcagaggacctgcggttctacccaggctgggaggagggctctg

SEQ ID NO: 51499 - DNA, 290 bp, Mus musculus
  source 1..290: mol_type = other DNA
gagttggcgagtctggacttgcaatcctgggaagacaagccattgcaggcttattccagagacaggtctgcagttctgcagttctgcagtgaggaattctgcatgctgcactcccaccagtgagatgtgcagagatccctgggagatgctcagggaacatccttggaagggcccagagtcacctttgcccttgactcagcgcccaacttgttttggcctgatgcccaggcatgggagggatttgattggttcagtccagcctaacccagcctcccacacgcttcctgaag

SEQ ID NO: 51500 - DNA, 321 bp, Mus musculus
  source 1..321: mol_type = other DNA
ggccttatcactttaaggacattaactttctccttgacagtagacagtggttttaaacaacctgggaagaaaagtcattcaaggcttagactgtagtcagtgagcagaggcattccagagacaggtctgcagttctgcagtgaggaattctgcatgctgcacttccaccagtgagatgtgcagagatccctgggagatgctcagggaacatcttggaagggcccagagtcacctttgcccttgactcaggcggtcctgcccaacttgatttggcctgatggagggatttgattggttcagtccagcctaacccagcctccc

SEQ ID NO: 51501 - DNA, 357 bp, Mus musculus
  source 1..357: mol_type = other DNA
tttttgtggattggagctctagtgagctcacagacgctgcagctggggaagggatggtgaggtctgatcactggtaagccttttgtccctgatagctacacctatttgaatcagtaagttatttaaaaaaaaaaatcaaaacacattttatgcataaaattctcaacaacaaattaataaaatattgtgtatttaaaaaaaaaaaaaggtgaccaagcctggcctggttgcattctcctagcaggagaattcctgtgacgagtctctgacgcgtaggttagctcagacttacctctgctaacctcagagttttgcccctccttttggccttctgccccagaggggaggaggcagttg

SEQ ID NO: 51502 - DNA, 263 bp, Mus musculus
  source 1..263: mol_type = other DNA
aaatatctgattgcaggaatgtctgccctggactgaagaatctttggaatgcttcgaatcttaagaatggttcccattcccaaaatgttttgctctagaagtgactttgtgtttgctttgttaaagaatagacttctacgtatgtttaaatccatgtaaaatataagaagtagagtttgggaatcccacctccagtttagaccccaagtatcaagccttacgttcggattacgtgcacgtgactcactggccagtaagaaaag

SEQ ID NO: 51503 - DNA, 444 bp, Mus musculus
  source 1..444: mol_type = other DNA
aacgttagcaattagattgttatataaaaacgcgttgatctggattaattattaacgaaatacacatgacttgtgaattattaattattcgataaattctgtcaccgcgacgctgccgccaccgcccaggctgcggagccgcgtcgctgcgggtgcccggatgcctagggaggccatggccgcagcactgagctcttagcaaaggacaggaccgcagctctgcctgatggcccagctccacccagagggacccgggcagcgcggcccagcagagcagatgagatgcagactcagctgccctggaaggccgcgtccccactgccgcctccgcttctagcggcgccctccccgcagccgggacgcctggccgcacgctgcgggtctctctccacgaagtggcatcctccgcttccttttcttactggccagtgagtcacgtgcacg

SEQ ID NO: 51504 - DNA, 248 bp, Mus musculus
  source 1..248: mol_type = other DNA
tagactgtcctcaagtttagtaacagccatcaggaacaatctgactcagtgtatatctgcatggacaagctgaactgtacagcacctcctgtccaaacagactatttggaaacatttcattagacactgggacagggctctgcttctgccctttcccactgtggggccagtgagaggcttgaacctaaaatttctaatttgaatctcaatgtggagttgttttgggatgcatatccaatgaaatatcc

SEQ ID NO: 51505 - DNA, 260 bp, Mus musculus
  source 1..260: mol_type = other DNA
cttcaagaaaacagtgttttccagatggaaggggaagtcctatgaggccccgtatgtgggagcagctggccaacacaaagcagaaatttgttgtctgcaggtatggtttgtgcacccattgcatgcatggtgcccttggaggcaaaatgaaccacgatgaggttctggaaagccaacccgagttctccagaagtcaaaatatcttgtgtggtgatattgaaacatgagctataaataatctccagagttgttggcacaac

SEQ ID NO: 51506 - DNA, 249 bp, Mus musculus
  source 1..249: mol_type = other DNA
atccaccaggctgagcagctggtgggcaggctccacaacccatttcgacaagagctcaggagatgattgggaaccaggttggccacatcctgatcaccaaccttgtccccatcttggccactttcccaggcaaggaggaggcatccaggctaggcagggattggctggcatagaatggccccaagcaagaatgccacagggagccagctggccttggtggttagttttgcataatttagggaggtatta

SEQ ID NO: 51507 - DNA, 290 bp, Mus musculus
  source 1..290: mol_type = other DNA
caagagcagatgtttattggtctgagaaaataaggcctgaaactggttttctggagggtttctctgtatagccctggctgtcctggaagaccaggctggcgtcgaactcagaaatctgcctgccaaagcagctcttaagagttgtgaccccattcttaggaggaagaattaggaacggctcactgtgaattgttacaagcaagagaacaaacttcgcttgctaagcgctccaggacctgagccaagggctcgctggcctatccggagaaaggttaggctcgctggcctat

SEQ ID NO: 51508 - DNA, 237 bp, Mus musculus
  source 1..237: mol_type = other DNA
ttagagtgtttgctactcttcaagaggatcagaccacctgtaactccagctatagggatccaccaggctgagcagctggtgggcaggctccacaacccatttcgacaagagctcaggagatgattgggaaccaggttggccacatcctgatcaccaaccttgtccccatcttggccactttcccaggcaaggaggaggcatccaggctaggcagggattggctggcatagaatggcc

SEQ ID NO: 51509 - DNA, 316 bp, Mus musculus
  source 1..316: mol_type = other DNA
ggcttccagttcattgcttaggatagggaagttgccaatttattactggtccatgcctggcactgctggagggtcatctctctgacccagtgggttccagcagggttgcaatattggtccacctagaacctagggagaggaaatgcatttcagagcctcacagttctgcactatgcagaggagctagagagatttatctgccaccccttcaggcagaaaggttatggacccgcccccactggccttggctgcctgcccaggcttggaggttggggagggattggttggttcagcccagctgaacttcccatacagc

SEQ ID NO: 51510 - DNA, 263 bp, Mus musculus
  source 1..263: mol_type = other DNA
gagcctaagtaggcaaacagagggatttttaaaaagccaatcagatagaggaatttaaacagaaatcagttttggtttgctatccactatttgtatgtcggaaaaaaaagctggcttccattattagcgcctcagtgagcactccgtggaactggtattaaaaagtgcaccaccactcccgggctggaaggtgttctgaaatgtgataaccctccaggatgaaatcacatttatttcggagtaactcagttctaaggagttgg

SEQ ID NO: 51511 - DNA, 551 bp, Mus musculus
  source 1..551: mol_type = other DNA
agtacaatgtacttacatgtaataaataaatctttaaaaaaaaatatggtagagatcccgagctggctacctctcttgtactcagagaataaaactttcattttaagctgctgtctttgaaatcaattttacctaacagatccactgtgaagctcttggtccaaaatcagtgttgatctgtatagaggatttccttgggcaaagaaacctttttggctgacgtccaaaggcagaaaacttcgggtgtgcaattccatttttctccagacaatttatagttgaattcattgttgatatgttattttcttggcagaaaacgggtatattgaaacacaaggtttgcgaaagctttagcttaacctccccaaatcttgatgacatagggactcttcctaaggaaaagtcttgggttttccactagaggctccactgtaaagctgtagcattagttctttaatgcactaagaatcctgctgaatgtttccttaaagccacaaaacttcaggttgcgccaggtttgttctgcagcggtactcagaaaggctgattgt

SEQ ID NO: 51512 - DNA, 309 bp, Mus musculus
  source 1..309: mol_type = other DNA
tgtatatttgtagatgtagacatccaggaaattttttgtctgaattgaagagttactctatatatgtcttgaattctatgttgaatattactgctatgtataattcaataattgtattcattggttgttgctctaattttattgattaaaaaaatggattgggtgtgagagactttacaacacttttacctcattccaaagtcatgagtttgcttgaatcaaaaatgtgcagggcctgttccccttaaaggcaaagttataaaacaggaagaggaatgttattaattaaggcatttaccggtacatcgg

SEQ ID NO: 51513 - DNA, 269 bp, Mus musculus
  source 1..269: mol_type = other DNA
ctgaacttgcagtgcctgttcccaggcaatggtccctatcccagcagggattttttctttaaaatttgaataaaaatgctttaattggcagagcaaacgaactttaagcttttgctatcatgtaactaaatctgactttaaataagcattggaaaaaccaagtctaaattctttttaaatgcagttatcaaggaggccagtctggtctacaaagtgagttccaggacagccagggctatacagagcccacttattaaattaagagttta

SEQ ID NO: 51514 - DNA, 294 bp, Mus musculus
  source 1..294: mol_type = other DNA
aaatatcatttgttcaataaacttgagctaaggtggggaggtgagaaatgtggtctcacatagcccaagatagcagcaaaaataggttccttggttccactgttactaatgtaggtccttggcaccttgctcaaagaatttaagaaggactacagcttcccagcacccaggtccggaggctgacaaactgcctttccaactccagaggatcagtcacagagaagcagcaagctctaaattcatgctgttactcctctttagctatgtagtgagttcagagtcattccaagcgcg

SEQ ID NO: 51515 - DNA, 260 bp, Mus musculus
  source 1..260: mol_type = other DNA
ttttgggagtagaaacctttcatttcgaagaactactgttgctacaatgtaactaagcctcgcattgaataattgtattagtgctctatacattacaaaggagactactcttctattgtacattccaaacgattttgagagtaggtcgggggaaaaaagtccccagaatgttcagctgttactgtggcccactatatacactagcagaaaatttgctccaaaaaccagattggatcagatttatccatgttctcctggct

SEQ ID NO: 51516 - DNA, 326 bp, Mus musculus
  source 1..326: mol_type = other DNA
tctgtattaatttacattctctcttaaaagttataatgactcatatatacttcttttaaaattttaagattatttttatatgtgtatgaatgttttcaaacgatcgtgtggatgattgaaagcaatcaagtgctccacatcttaatattcagaaatccacaaacactatttctaggagtttgagttcttcatgttgaagatatattctgaattcagcattctctgtacgttataaaacccaaacactgtacagtacttcatgaggatctgcgtttggtatattctctttaaatagaatgacaccaaatatactccggcctgcatga

SEQ ID NO: 51517 - DNA, 260 bp, Mus musculus; identical to SEQ ID NO: 51515
  source 1..260: mol_type = other DNA

SEQ ID NO: 51518 - DNA, 320 bp, Mus musculus
  source 1..320: mol_type = other DNA
ttacattattaattcatatagtaataatgtaagagacatttgcaaaagcatatgtctttatcaaacgtgttttaaaatattatttcttcagacaaagctttaacatatttgtacaggtttctttcaaacctggggctcaatcaacattttaaatcttaactttcaaaaaatataggtgcaaccctacactgagtctgggatgactccaaacggaaataagaaggcgggtccagttccaggctcttccgaaggacccccgcatgcgtccgaagccgcggctttgacgtagcctggcgcagcttggcaccgccgacccgacg

SEQ ID NO: 51519 - DNA, 299 bp, Mus musculus
  source 1..299: mol_type = other DNA
tattctacagtcttgcctatagccaatctaatggaggcatttctaagttgagttcccttctcttacattattaattcatatagtaataatgtaagagacatttgcaaaagcatatgtctttatcaaacgtgttttaaaatattatttcttcagacaaagctttaacatatttgtacaggtttctttcaaacctggggctcaatcaacattttaaatcttaactttcaaaaaatataggtgcaaccctacactgagtctgggatgactccaaacggaaataagaaggcgggtccagttcc

SEQ ID NO: 51520 - DNA, 365 bp, Mus musculus
  source 1..365: mol_type = other DNA
gacactgagtcagagaccctaccttcctttgcaagttgttcactttgaagatagtaataaagaaatgttctccccagggattgataacagttaacagttactaagggagagggctcaggaggtctcacccctcccccaagatctttgctggagaagatatgtttttgttcacccatatcgttcccagggtgcctctagataaggatatcaggaatccttttatgagagcctttgacatcaagatttgtcacctggagatatttttaccctttaggtatcatgttaccagaatctctggtaaatagacatttctcccaggtaaggcaagcacaatgatgtcacagaccactgttttatcctgtctt

SEQ ID NO: 51521 - DNA, 423 bp, Mus musculus
  source 1..423: mol_type = other DNA
aacactcccacaatcaggcctggattgaagctggttggaatcccagtagttttcacatctgtaaaatggaactgactaggtcctcttcactgctagagagaaagcccccggaccggagctttgtgaaggctgggacgcctcgggcaccatgcctggcacactttgcttgagcaaggaccagccctcaataaataacagctgttgttgactcggacggaggcaaggcactgggctctccacccacacgggcgcccttcgcgaggcggggtaatccgggctccggggtccttggcttgggtccagcctgaggccctgggcggcggcggcggcggaagcagcagcagcggcgggcgggtggcaggctgctcaggaagtgagtgccttcccgcgccccctcccccggccacgccaccgggcgcttgc

SEQ ID NO: 51522 - DNA, 170 bp, Mus musculus
  source 1..170: mol_type = other DNA
cttcctgtaattagagatccaggcttgcagcaccataaagggtttccatgggaactcaagcggccagtcctgcagtcagctgattttaaaggatctctagtctggcagtgactgccgccatttgacctcagccctgtcattgctgctagagctcagagcactgtccccgc

SEQ ID NO: 51523 - DNA, 290 bp, Mus musculus
  source 1..290: mol_type = other DNA
tcctaggatagatccaagatcatagagactcccaagaactaagtctgtgcagacacattcaaaccccatagctagctaggtgggctccaacttcagtgagagatgttgcctcagtaggaagacaatgtctaccttgtgctcacatctgtgcatatacatattcatttgtacgtgtatgtgtacagagctaagaaaactctgggtttgatactctcagttttctctgaaatttaagaccaatcaaaagcagaccttctctgtttctgtataagagcttccttctagagaag

SEQ ID NO: 51524 - DNA, 346 bp, Mus musculus
  source 1..346: mol_type = other DNA
atcatgttggggtgggggagccttgggaggcttcacccttccctgacagtgttgtagccacctatttagttgccccaataactgctagcatgttcaaatcacagcactgattagggcctaccagtattggcttgatatacatatatgaaaagaaagaaaaggccaggcgtggtggtgcttgcctttatgaatgagcgacacatatctctccccctgtcccggggcctgccactggaggaggcgtggcctgacgtccagggggcgtgacccgaggcgagcaggaagcgggagccggtcgccgcaccgttactggtcgttcggggtcacgtgagcgcgcaggcgcagc

SEQ ID NO: 51525 - DNA, 213 bp, Mus musculus
  source 1..213: mol_type = other DNA
agagcattgtgactccagggacatagggtgtaagtagtcctggtgacatcagaatctctggaagatatttttttaacagctcaaagaattctattctgttccagatatgtcctcaccataggtctacctctttagagacgtcttaagaccagacaggtctaatgacaggaggggacagaaaggctatctccgcctccttccgacttggtgtgt

SEQ ID NO: 51526 - DNA, 280 bp, Mus musculus
  source 1..280: mol_type = other DNA
gcgagcgagcgagcgagcactgggattcccgagcactggctgctcttccagaggacctggatatggtggtcacaaccacctgcaccagttccaggggatctagccctcttcttgcttcacaggcactacaaataataaaatttaaaaacatttaaaaaatgatagttaaaagtcatctttcctagaaatcttttctttaagaagaaaagtttgaagccagcctggtccacagagtgagttccaggacagcaggcctggctcctcgatcacctatagaggc

SEQ ID NO: 51527 - DNA, 282 bp, Mus musculus
  source 1..282: mol_type = other DNA
tcagcctgctctctgataaaacccaaggctgccagcccattgagaaaacctcaatgtggtaactccagctgtgtcaagttgacactgagtactgggattgcaggtgtggaccattattaaaaagtttcagaatagtacaggtactgcatttaacgctgcaccatcaccaaggcggtgttagtgataaaatccagttgaataatatagggttcctcaggctttgtgggcacccgcccctcgggacgccccgccccaccacccccccaaggccccggccccgcc

SEQ ID NO: 51528 - DNA, 267 bp, Mus musculus
  source 1..267: mol_type = other DNA
catgtatgaccaagcccagggcttgtgttctctcactgaaaccagtgctagattggcagacactcatgtttgccatgcaagagctctaataattgatgtctaacccctttgggcggatttccttctgcaaaatgtgatcataggcacggaagaaaaactcttccattctagcttgtctttatctggcagcagggcggagtcagaagctgcggcgccgcggggcctggaccgcccaggacgtcccgtattttgaaggccccaccttct

SEQ ID NO: 51529 - DNA, 300 bp, Mus musculus
  source 1..300: mol_type = other DNA
ggggcagagacaggcagctctctgtgttcaaggccagcctggtctatacagggcaagttccagatggccagggctacatggtgcgtctagctagggtttcatagtgaaaaacctgaaaaagcctaggatcatttgttttagctttgtatttaaacaaaaatggctatgatgtcatcaggacgttaaagtccgtaacgtcacctagaggtagctcaatttcccttcctttctccgggagaccgagggctagaagggtggatcccaggaggctcctaccccccgagctcactggcctttaga

SEQ ID NO: 51530 - DNA, 285 bp, Mus musculus
  source 1..285: mol_type = other DNA
cccagttacctggcaatagctaggtatgactaactctagaaaaggggctgtttgcccccctggggcagagacaggcagctctctgtgttcaaggccagcctggtctatacagggcaagttccagatggccagggctacatggtgcgtctagctagggtttcatagtgaaaaacctgaaaaagcctaggatcatttgttttagctttgtatttaaacaaaaatggctatgatgtcatcaggacgttaaagtccgtaacgtcacctagaggtagctcaatttccctt

SEQ ID NO: 51531 - DNA, 219 bp, Mus musculus
  source 1..219: mol_type = other DNA
caagagctgggatgacaggtctgtcctccaggtaaattcctggacaccaagacccctggtggtggaggacaggcaacagggcctagggttgcaatctctacaatgtaagatctcaggaagcctctaagaggcagagagtaccagggagagaacttaaaaaagaaggcatctacgtcctgatttgtacgcccgaatttccggccacccgctttataaagt

SEQ ID NO: 51532 - DNA, 407 bp, Mus musculus
  source 1..407: mol_type = other DNA
ttagatatctccagtagagcagacatttattaagtaactagtgtatgcctgaggcagtgtgcctttctactaatgaaaattgctatttagttaataaaccattgctatggcaatgataatgactagggaaaacacttagaaatataggaaagtatcacatatagataatatttctttttttttttttttttttttaaagatttatttatttattatatgtaagtacactgttagacagccaccatgtgaccttcggaagagcagtcgggtgctctaaggctgaattaaactcgttatataaatcccattagaatagtttgcttcttactcctgaaccaggcaggatttagaggtagctggctgagcagcatcccacttaggcccgccctcaggcgggtccccaccct

SEQ ID NO: 51533 - DNA, 303 bp, Mus musculus
  source 1..303: mol_type = other DNA
atctaacctaaaaagccttccttttaaagaaaatctcctctgtatatgggtcaatataagctccccaggagctgcagagatctaggccagcctggtctacaaagtgagttccaggacagccagggctacacagagaaaccctctggtctcacgtgggaccttgagtctgactactggagtcacaaattcagggatcctggattatcatccttcccggcccggatcgtagcggacgccatattccttccgctccgaaggactgtcccgaggattcctgggtaccgcgtgcggtctcgcgagagc

SEQ ID NO: 51534 - DNA, 239 bp, Mus musculus
  source 1..239: mol_type = other DNA
tcaattacaattaatacaattgtagtatcaatctaccaggcccatgttagaataaatgtttctctggttcgcctgcagctggaagtttaggtcaaaattgctaagttcttaccaggctggcctggaaaggcgtacaccaccactgttcagcagaagtttcaactactaggcaagtgctctactactaaaatcaaagtacccttgtattcgggtacttacggtcgcaggcttgcttgcgc

SEQ ID NO: 51535 - DNA, 249 bp, Mus musculus
  source 1..249: mol_type = other DNA
ccctaccttagtggaactccaagtgaacttccttagacttaattactagctttgagttcagtactcaagtccagggttacacagagaaaccctgtcctggtactcgggaggactccgctccgaccccaggaagtggtccgaatgttcgaaagttaggctcgacatgttcagctttcttgatgggctgcacgcgactcgtgtccatgatggcggcgatgctctcgcgagaccgcacgcggtacccaggaa

SEQ ID NO: 51536 - DNA, 428 bp, Mus musculus
  source 1..428: mol_type = other DNA
tctgagtactgggaactgggattaaaggccaccaagcctgttttgattttttaatctaaaagattgccagcctgttctcgaaaaaacaaaataaatatatatgtaatttatgtgttttatatatatatatatatatatatatatatatatgcttatatatataatacgtactattgggtattatttatatgtgtaaagatatatgtttatgtatataatacatattgtttatgtataatatataatattggaacatctccagcttccacttttcggacctgagaaagtggagacctcaggaagccgcgctcggcgctcggtctagttctggtgctctagcggactagaagagtcgcgactcagggggcgtggccccggaggcggagggcaccgtgattggctcgcgaccgcggcgccggcgcggattg

SEQ ID NO: 51537 - DNA, 257 bp, Mus musculus
  source 1..257: mol_type = other DNA
aacattggagacaacatctcacgctgtcctggaactcactttgtagaccaggctggcctcagttacctggcaacagccagatatgcctgactcgaataaactctattctatactatattgtctattgtatggctggtccctagggggaaaggatgcctcagtatgggcccacagaggcaccatcctcctgcctcagcatcctgaaggttgggaattgaggagcctggctagatttttaccaatctgaagaccatggg

SEQ ID NO: 51538 - DNA, 282 bp, Mus musculus
  source 1..282: mol_type = other DNA
gaataaactctattctatactatattgtctattgtatggctggtccctagggggaaaggatgcctcagtatgggcccacagaggcaccatcctcctgcctcagcatcctgaaggttgggaattgaggagcctggctagatttttaccaatctgaagaccatgggatgctccctctcggtcaggagaggcccccacctgagttacaatgtgtttaagctagatagccactgatgtttacagtctaacaccctgacccatagggtcaaagccagcagctgcccc

SEQ ID NO: 51539 - DNA, 486 bp, Mus musculus
  source 1..486: mol_type = other DNA
aatccaatggaggacaaggaaccaacaccctgtccacaccacgtagtgggtttcaaccggggctgtaggctggagatttttcacctccacagccctaggccgcccgccttcagggctagcaaggtaccctaccagctcggccctgagcctcgtcgggcaggccctgccgagccgtcgccttcgccactcctgcgccgcgcgcttagcgcttccgcctggagcacctgagggcggccatattgctgtacgggacccaggccgcttagagccggaagtgacgctcggctcgcccaccgaggccaccgctccggggacgcggaggctcgacggggcggggcggaggaccaggtagatggggcgcgccatgttgccgtacggcaccggcctgctccgcggcgaggcgtggagctctttgcaccaggagcttgccgaagccgctcggccaatcagaccccaagccatcgcgtggagtcgcacggggaccgg

SEQ ID NO: 51540 - DNA, 413 bp, Mus musculus
  source 1..413: mol_type = other DNA
aagagctccacgcctcgccgcggagcaggccggtgccgtacggcaacatggcgcgccccatctacctggtcctccgccccgccccgtcgagcctccgcgtccccggagcggtggcctcggtgggcgagccgagcgtcacttccggctctaagcggcctgggtcccgtacagcaatatggccgccctcaggtgctccaggcggaagcgctaagcgcgcggcgcaggagtggcgaaggcgacggctcggcagggcctgcccgacgaggctcagggccgagctggtagggtaccttgctagccctgaaggcgggcggcctagggctgtggaggtgaaaaatctccagcctacagccccggttgaaacccactacgtggtgtggacagggtgttggttccttgtcctccattggatt

SEQ ID NO: 51541 - DNA, 616 bp, Mus musculus
  source 1..616: mol_type = other DNA
tcttccttttctccgcggctctgcgggagaagaagacaccccgcggcttaagcccgcgccaggtggcgccctgcaaacccaggcagtgaagcactgccttctgtaccggtccgactccgggacaaacagggggcccacggttcgcaccagggggctcggtcataacgacagtggtgcagtctgagatggtgtcgccgaccactccagcatcatgctgtgctcatgcacctggcccaggaggcccggctggacagcctcgaggtgcacgcctccagggcaggaaaagcatatcttttatttcgttccctgttaccctcctagggtggagggaccggtccccgtgcgactccacgcgatggcttggggtctgattggccgagcggcttcggcaagctcctggtgcaaagagctccacgcctcgccgcggagcaggccggtgccgtacggcaacatggcgcgccccatctacctggtcctccgccccgccccgtcgagcctccgcgtccccggagcggtggcctcggtgggcgagccgagcgtcacttccggctctaagcggcctgggtcccgtacagcaatatggccgccctcaggtgctccaggcggaagcgctaag

SEQ ID NO: 51542 - DNA, 347 bp, Mus musculus
  source 1..347: mol_type = other DNA
aaggcgtgagccgccatgcctttgtctgcagaccagtgtggccacacagtgcgacccggagggttttgatggtgtttcttttgacaaaaaaaaaaaatcaaaatgttttaagttttacacagacacattaataaacaatgaatttctttttattgtattctttctttaaagataagtgcttcggaagccttcttaagcagctttcctttggccaatccgttagatcccgcgagcaagctaacgtccagagctcggggtggagcttcggccaaacccctcatgaagcgccggttctttaaaggaaaacagcggcacaggaggggtgctggcctgcgcctttaaggtcg

SEQ ID NO: 51543 - DNA, 283 bp, Mus musculus
  source 1..283: mol_type = other DNA
tgcgtcaccggggacactgtgagtcggatctggaccgggtcctggacctggacccgggacaccttctgggccagcattgcaacccaagagggagtcttccagtgggtgggggcagtggcgatgaggcaaattcggccacgcccccgtccccttagtctaagagcaatggctcccggtattctagagaagggcgtgggttgcaccgtcgccagcccgttcggctgtggggatcccaaattgttaacggtgattaaaatatttatttgctgggacctggcacagg

SEQ ID NO: 51544 - DNA, 227 bp, Mus musculus
  source 1..227: mol_type = other DNA
ggggcagtggcgatgaggcaaattcggccacgcccccgtccccttagtctaagagcaatggctcccggtattctagagaagggcgtgggttgcaccgtcgccagcccgttcggctgtggggatcccaaattgttaacggtgattaaaatatttatttgctgggacctggcacagggagctacagacagggtttcggcaactctgcccagatcggggaatttccagtt

SEQ ID NO: 51545 - DNA, 467 bp, Mus musculus
  source 1..467: mol_type = other DNA
ttaggacgaaaggtcttcatagcatcttaagattctagagacctcacctcgtctcgcacccgggagacgacatagccaccgtgggaaccgcgcgcgctcgggcgcacggtgagagccggacgcccggagcgacggacccgagtggaaccggaagcgccgcactagccggcttccgccccctccccgcgagtgggcgggcataagggcggcacagaaaacccggcgcggattcgctccgttgcactcgtgccggggcggcagtgtcattctcgagctgcagtaacggggtcgcgccactgctagggcactttcctcggacaggaccctggtctccagcgtgtctgctgcgagacgcgggcttcagagccaccgagtggggctgcaaggggtgcacctgcagcctgcgtcccagttttggctcctgctgtcgggcggacgcggggaggggggcccgggagcccggcggg

SEQ ID NO: 51546 - DNA, 416 bp, Mus musculus
  source 1..416: mol_type = other DNA
gacttgtcgacaaaacttccgggcctcctccaggggggcggggacgggtcctgggaacgggtcctgagcctggcggattctgatggatccggttcctctcgatctccggggacgacctgcattccaccgggacttctgggcgatgtgcgcgctcttggacctcgggggtcgcgactccccagtcctcgccttcttccgaggcggccccggggaggtggcgacggcggccggggtggtctcctcctcccagtagcgccgcggttggggcagaagccttcgcacacgctgcccgagcctgggcccgggacgcggacacctagggggtgggacacccctacccggcttgggggctgtctccatcccgccggcgtctgaagcctccggcgccacttgttaattttaggtcgatgtatcgg

SEQ ID NO: 51547 - DNA, 200 bp, Mus musculus
  source 1..200: mol_type = other DNA
tgacatagatttactcaagtctggggtggagatgcacccccgcagcccccaatggggcgcgacggggggtcgctgggtctcaagctctgggaggcacctgaatccgccgcagcctcttttcgtccagaatagccactccctaggcaaaccgatacatcgacctaaaattaacaagtggcgccggaggcttcagacgccgg

SEQ ID NO: 51548 - DNA, 387 bp, Mus musculus
  source 1..387: mol_type = other DNA
agtgtttacccctgtgtctggtacaccatttaacatgctcatttaaccttttacgctaaacactaaaatttttttctactaaaaatcgctgacgatactccggaggacctacagccccgcgcaacaccagctcccgggcagcggccgccatggtcgctgcggctgccattcccccgcattcacttccgacttccggcagctgtcagtctcagaaagtccgtttcccgaagcaaagctacaagtcctggaatgtcttccgatcggctccagcctctccggttaggctttgatcatctcgaacactctgttccgaccggaagttatagctccggtcctcctcccttagggggagactttccggaagtggacctccggggatagccccgc

SEQ ID NO: 51549 - DNA, 384 bp, Mus musculus
  source 1..384: mol_type = other DNA
cagactggttcctggaatcaggagataaagttgtctcccctgtctcaaaatctaggttctggccatagaggaggcttaagctgcccactccttcgtgtccgcggtcagcacaccaagaccactggccgcaggggccgtaataaatagtttatataacagctctggcttctgggtacagtgctcttggtgcacttgaacggaaagcagcaaactgggcggcaaccacacctccaggggaagcttgggcaggcttcaattgagtctcagtggctacagctccgccagatgctgctgcgagttaacagcagatgctggctgctctagaaaagcagcctggtattccctttacagtacgggaagggcacgccgcttgtcggcttccgg

SEQ ID NO: 51550 - DNA, 367 bp, Mus musculus
  source 1..367: mol_type = other DNA
ggtttaaccctgggtcggcgagtactcgcaaaatgtgctggaacttggcgcgacaagagggtggacgtcggccgcggcccccaattccctggacaggggaagcgggagagcattcctcggggccccgatccccgggatttcatcgctccacagagggctgtgggcccgcagcatggggcactctctgagtcctccctgccccggctccgatgtcgcaggatcccggcgcggattccgcttaccatggcggcggcacagacggcggcgtgtaggcctgcggggctatccccggaggtccacttccggaaagtctccccctaagggaggaggaccggagctataacttccggtcggaacagagtgttcg

SEQ ID NO: 51551 - DNA, 327 bp, Mus musculus
  source 1..327: mol_type = other DNA
cactgcacaagtgtcccacacagctgtgacattcatgtctctcacctcatcagctcttaagtgtgagtaaattacataacttctaccacaccctctcctactgtgattaagtcactaaaacaacagtggagacagcgatcagtgccctgctgtctgtggtctgcacaggggtctctcttcagtggacaagggggtctcctgtgctgagacaaaaccctgaggctccagccttttcttctagaagacactagggtgttgagagtctggcctgagagtctctcctggtgtcctagggctggggaagcccagggctggggattccccatc

SEQ ID NO: 51552 - DNA, 343 bp, Mus musculus
  source 1..343: mol_type = other DNA
tctacctatagttcctctcctactgtgattgagtcactaaagcaactgcaccggagacagggatcagtgccctgctgtctgtggtcttctcttcagtggacaagggggtctcctgtgctgagacaatgtcccacaaggaatctgtgtctcagcacagggctgagaagacagatacagaggggcttgcagcccagcgccttgactttaaggaaaagcgcttttcttctagaagactttctacagagagtctggcctgcgggtctctggggtggggaagcccagggctggggattccccatctccacagctgggtcaggtctgtccggaccgcggacgctggata

SEQ ID NO: 51553 - DNA, 456 bp, Mus musculus
  source 1..456: mol_type = other DNA
ggacaccccctggcagccgctgcacaggctggcgaccggcagtcccggagtgcaggggcccgccccatctggtgtccccgtcccgggccgcggctcctaaacgcaattctcgagtctctggctccggccgagagttgcgtctggacgtcccgagccgccgcccccaaacctcgagggggagaggccgggcggagcgcgggacggtccccggacacccgggaccccgccgcagccctaggatctcagggcgcgcacccagcagcagaggtgcagctgcggccggctttccggggttctcaggcccggcttgagttggggatcagcgccacggaggggatcctccgccctcgggctgcacccaccgggccggctcaccgcgcgcccggcgggggagggggaacccggttccacggcgcgcgtggcgcgcgagggcggtgacgtctccgtcgcggggtg

SEQ ID NO: 51554 - DNA, 154 bp, Mus musculus
  source 1..154: mol_type = other DNA
tctcccagggcaacccccgccgccgggtgtggagggaggggattctgcccccaccccctcggaagggggtcttggaacaggtggccctcccccaccgccggacaccccctggcagccgctgcacaggctggcgaccggcagtcccggagtgcag

SEQ ID NO: 51555 - DNA, 353 bp, Mus musculus
  source 1..353: mol_type = other DNA
tggagcattggcaggcactgcctgtgcccttctcaccgagggaggggcagtgaggtggtgcaggtcctggctgggtcctgccattcacttctccactgcagtcactgaggggtgaggtgacctgtccttcccctaactcctcagttggtagtcctggccagtgctaatgccagaagggcctcgcagcgttgttgctgtagcctacccgcgcagaagaccttggatcttcggccccacatgcagcactgggccccttggctcctggactccctaggtccccaagtgccgtggctaccaaaggcctcattgggtccgtaccgggcctagccacgcccccggcgtgctcagattgg

SEQ ID NO: 51556 - DNA, 684 bp, Mus musculus
  source 1..684: mol_type = other DNA
gctcagccttcgaatgccgagtcccccacggggaacggtgtccttcccacgcccgagaccgcgcacgcaggccccgccgcgggcccgaacctgaagggcggaagctcccccgccgcgccccgccccgggggagggcgctgggcctcgggacgtcgagggcgcgtcgggagcgcggggagggggcgcgaggggcgccggcccgggcccacgggacactcaccccgcccgccccccggctccggctccagggcttgctgctctccggccgccgccgccgccgccgcgggatccagccagggccgccgccgccgccaccgggacgcgaccaccggcccacactgccccgcggcatgccgcggcgggaggaagggcggcccgggccgggggacagcgggggactcgggggccgcgacgaagccgcggaggcgagcaggccgcggcctgtggcagcgcgactcaagagccgcgctcggctcggcactgagatgacagcaccggcgcggccgccatctttgtacagacgccttgagctcccgccccttcgccgaggtggaaacggaggaggcggtgcccgccagcccgccgtcccctcggcgcatgcgtcctgacgccgtggccgcgccgccctcggggcgccgccatgttggtaaaggggagcttccggatctcgcgggagctcgaggc

SEQ ID NO: 51557 - DNA, 662 bp, Mus musculus
  source 1..662: mol_type = other DNA
gggtcatcccaagctgacctcgggagggggggctgtgaagcagcacgtggaggtgtagcagcgaaccccgctcagccttcgaatgccgagtcccccacggggaacggtgtccttcccacgcccgagaccgcgcacgcaggccccgccgcgggcccgaacctgaagggcggaagctcccccgccgcgccccgccccgggggagggcgctgggcctcgggacgtcgagggcgcgtcgggagcgcggggagggggcgcgaggggcgccggcccgggcccacgggacactcaccccgcccgccccccggctccggctccagggcttgctgctctccggccgccgccgccgccgccgcgggatccagccagggccgccgccgccgccaccgggacgcgaccaccggcccacactgccccgcggcatgccgcggcgggaggaagggcggcccgggccgggggacagcgggggactcgggggccgcgacgaagccgcggaggcgagcaggccgcggcctgtggcagcgcgactcaagagccgcgctcggctcggcactgagatgacagcaccggcgcggccgccatctttgtacagacgccttgagctcccgccccttcgccgaggtggaaacggaggaggcggtgcccgccagcccgccgtcccctcg

SEQ ID NO: 51558 - DNA, 612 bp, Mus musculus
  source 1..612: mol_type = other DNA
gggagcagcagggacctctcaccggctccgggatcctctcgcctcgagctcccgcgagatccggaagctcccctttaccaacatggcggcgccccgagggcggcgcggccacggcgtcaggacgcatgcgccgaggggacggcgggctggcgggcaccgcctcctccgtttccacctcggcgaaggggcgggagctcaaggcgtctgtacaaagatggcggccgcgccggtgctgtcatctcagtgccgagccgagcgcggctcttgagtcgcgctgccacaggccgcggcctgctcgcctccgcggcttcgtcgcggcccccgagtcccccgctgtcccccggcccgggccgcccttcctcccgccgcggcatgccgcggggcagtgtgggccggtggtcgcgtcccggtggcggcggcggcggccctggctggatcccgcggcggcggcggcggcggccggagagcagcaagccctggagccggagccggggggcgggcggggtgagtgtcccgtgggcccgggccggcgcccctcgcgccccctccccgcgctcccgacgcgccctcgacgtcccgaggcccagcgccctcccccggggcggggcgcgg

SEQ ID NO: 51559 - DNA, 487 bp, Mus musculus
  source 1..487: mol_type = other DNA
tggagccccacatggctatgttcacgatgggcatgtccatgtcctccgtggtggaggctatcgtgggagtggccatggctatggccatggtgtatcctcacgtgagtgtccatggtcgtggctgtgggcatgcccatgccagatgctttcatgagtgtggccgtggccatgccatggaagtctcttccacattgcaggtcaccatgaccctcgtgagcagtcccacagccacccagtggggggcccgcaggcccatggtcatcacgctgaccggaggaacaagagacgactgggagcagcagggacctctcaccggctccgggatcctctcgcctcgagctcccgcgagatccggaagctcccctttaccaacatggcggcgccccgagggcggcgcggccacggcgtcaggacgcatgcgccgaggggacggcgggctggcgggcaccgcctcctccgtttccacctcggcgaaggggcgggagct

SEQ ID NO: 51560 - DNA, 356 bp, Mus musculus
  source 1..356: mol_type = other DNA
ctcaggtgggctgtcccaaagctccctgggctctgcctcggcacataaagttgctttccagttaaaatagccattttctggtggggatatccggtgagaaaccctgacatgttccctggatgctgccacggcctgaggttccctgggcctacagagccggtgcagggctgcttttcaaaggcgccttgagcgccagcgggcggcggcgccacaggctcctggcagacccggcactgtgcccacgcttaggggtgcgctgctctcagcgataccctcctagcctttgggtcgctatctatagctgggtctataaacactgggcgtggaacggtcgcccgtaggcccgccccttctgt

SEQ ID NO: 51561 - DNA, 429 bp, Mus musculus
  source 1..429: mol_type = other DNA
cacggcctgaggttccctgggcctacagagccggtgcagggctgcttttcaaaggcgccttgagcgccagcgggcggcggcgccacaggctcctggcagacccggcactgtgcccacgcttaggggtgcgctgctctcagcgataccctcctagcctttgggtcgctatctatagctgggtctataaacactgggcgtggaacggtcgcccgtaggcccgccccttctgtgactcttcataggggctctgggcccccaagggcagctgccgtgaagaagatatattctgttcccacaaatgccatctgagggggcacgcgagctacctaatccctccaggagtaggggtggctagcgagtgaggaaggtttccaaccctcacactctcctgcccaggtggagatcggggtgggggctggggtctctgag

SEQ ID NO: 51562 - DNA, 320 bp, Mus musculus
  source 1..320: mol_type = other DNA
tgaagctcttccttaggccatggtgcctctcgaagtcacactgccatgcatcctagctcagagacaggaactccctggaagaagcgcaggcatccaggctggtacccatgtgatatcattaatttattggtaatgatgctaagagctgagcccttaagtccatcaaggagtagagccctctgtgagttcaagggtgttccttccgtgaagcttcactgtagctgtacagtgttatataaccagtgccacggagctctatagtctatagctggcactcagccttcagtacgctaactataatctctggaattactaaatat

SEQ ID NO: 51563 - DNA, 405 bp, Mus musculus
  source 1..405: mol_type = other DNA
gtcaggaagatggctgccaagacaaagctgttactgttatttactgtattgactgagtccttccagtgccagccattggctgagttcaccaataggcaaacgctaggtgcatgcggaccctggtcaacctctggccagcgtgcaagcaaatggagaccaccaatgtcctctgcctgtagtgttccttcagggggacttccttacagataaaataaaataatgtttttgaaaatgatttacaaatataagagtttctatgctgtgatttattatatccaaaccccccaaaatttccagagggacccacaggaaaaatatggaccagatggaggctttgcccagcatagccttcttgaaaggtgaagtgaacaaacccattatctcagagaactgctctgattggct

SEQ ID NO: 51564 - DNA, 322 bp, Mus musculus
  source 1..322: mol_type = other DNA
gtgttccttcagggggacttccttacagataaaataaaataatgtttttgaaaatgatttacaaatataagagtttctatgctgtgatttattatatccaaaccccccaaaatttccagagggacccacaggaaaaatatggaccagatggaggctttgcccagcatagccttcttgaaaggtgaagtgaacaaacccattatctcagagaactgctctgattggctagagccactcaccccagcaatggtcctttttgtggagctggtcccggtactcctaaccgcaatgagcttcctgagcgcaatacattcctcagaag

SEQ ID NO: 51565 - DNA, 575 bp, Mus musculus
  source 1..575: mol_type = other DNA
cacgctggggcgagatggggccaaggagccgtgcgctgcgcccgctctcctcaccctgacgccgggaaagtttgccgagatcccccggggctggctaacagacactcggggtggcctcgcatctttacgcggggttagtggagcgctcagccgagaagcaggccgcgacttctaagatggcgtcgcggcggcctcgcagccaagaattcgcccgccccgcccgcgcgacccgtcccactctgcgccccgcccgcgccgccaatggcgaccagcctgccgcgggcgaccggcagaacagcgtgttgcaggccccggggagatggcgcctacacgccgttcggcccagggttcgccaagccacggcgcagccaattggctcggagacatggcggggtgccttttcgccttggccctgctgccgataaaggctcccgcgaagaggcgggcctgccccctcgcctttgcttctccaggcgcgtgagcgggcgagcacgcgcggagggggcgggggagctcgcgagcagggtggcgcgcatgagcagcgaagctccgcccctccggctatatataaagcg

SEQ ID NO: 51566 - DNA, 378 bp, Mus musculus
  source 1..378: mol_type = other DNA
tttctttttggctaagagagcaaatggtgcagcttcgcactttaagtcaactgcattgtttttaagttgtcaccctaaactttagtaggatgaattgtctcctgtttacccccaccgttccagggaggctcgccctgcagtcccgctgctgcagccaggacccgcgtgcctcctgggaccacagcatggggccccgcggattctggccagcggagccggaagaacctattccccccgccgcggtggggaggggggggaggccaccggggcgcaggcccgcgcgctcccgccacacccatcgctcaacgaggtggccccgaggctcggggcgcactgagcctgcgcaccgcggctctccccgcgacccggcacaccctt

SEQ ID NO: 51567 - DNA, 658 bp, Mus musculus
  source 1..658: mol_type = other DNA
tgtccccccccccccccccggtgacgggtgcatggggcacaagccaccctcgcccctttgccctcggtatgtaggcacgaggaggtgtttgaaagacaggcgtccccgccccaggggcccctgctcacctggatccaggagccacgggggggccctcgaaagtcgccctcagcccggctggggggggagcaaggaatccggggtgtcaacccccccggaagccgagaaggcgttgggggagggggcgtagcccccagcccctcccttccctagccgctgggggtggggggaaaagcatcggggccgcgcggccacgtcagcagcgctccgactggctggggcgggtcacgtgtccgccccccctacggccacgagggcgaggggcccagacctgtgtcccgagaccccagacctcgctaaggctgttgcctcgccaggtccccggcctcgcatggctgccgcagccccacgaaacacatagcgcatgcgcaagggtgtgccgggtcgcggggagagccgcggtgcgcaggctcagtgcgccccgagcctcggggccacctcgttgagcgatgggtgtggcgggagcgcgcgggcctgcgccccggtggcctcccccccctccccaccgcggcggggggaataggttcttccggctccg

SEQ ID NO: 51568 - DNA, 350 bp, Mus musculus
  source 1..350: mol_type = other DNA
catgcctgtagccccagcttcaggaatgtgagacaggaggatcactgaatccgaggccctacttgtccacagatggtgcttgtggttgtgaaggcttgaagatcacagtgaattccagcccgtgctacatagtgagactctgtctcaaccctttgtaaagccgggtcttggatcacattcaatgccaactttctttggaaggagagccgccaggcggcgctgctttgaagagccaggcagctacctgctggagcccgaccttccaccagggggcggaggtctccagagaggccctccgggccccgctggcctcggagccaagtcttaaagaggagcctggacctcagcga

SEQ ID NO: 51569 - DNA, 432 bp, Mus musculus
  source 1..432: mol_type = other DNA
tagctagtccagcctacctggccagtaccagtggcctctgcccatatttgcacataggtgcatgcatgccatatacacacaagcacccacacacaggaatacctgtgcacatgtgcaaacacgctcaagtgtcatcacaccacatctctactatgaggtcagctcaacagagcggagcttgggcctgaggtcagcttttgaccaagagcttcagtggaactgtcctggctcccaaagcagctcctacagcctaggagggtttccaggctggccctcctgagtgacaggacagaccaggggtgtagagaggaagatagtagtggaaattcctcagtgactaccacagggacctcaggaagatcctgttcttaaggccttgggcaagtaactgatgatgctaggctgattcactcagtgattggtctgacctgc

SEQ ID NO: 51570 - DNA, 492 bp, Mus musculus
  source 1..492: mol_type = other DNA
ccagcgtccctgttgccgctgggcgcccagaggctccccaacttgtgccacagggcggccgactgttccagtacagtaatccagcgctgtcaccctcccggagtgttccccaggcggccagctctcgtgcggccaccagcggctgcaaagcagccagccagccatgggctcctgcggtgaccccgaggaccccgcggacccctagtcctaggatggcccagcgacccgggagcgcagcagcgcagggcggccgccagccagacgtgcgcagccagctgtccagagtctggtcctagcctgggactctcgacgtccgcgctgcacaggagtgtccgagggcgtgcgcgtaaagtcccgggaacccgctcgagctggtggagctggatggcttgctcaggcaagctgcccccagattgagggcaggaccctctgtcgtctctgggcagatttgccctgctcaggtttgctctgggcgccggcacgccccttgcg

SEQ ID NO: 51571 - DNA, 376 bp, Mus musculus
  source 1..376: mol_type = other DNA
cactgtggttggtggcttttagagagcagaaaccagctgccatcttcccagcgagagcttgtcctcactcagggtgggggctgtctggggtaaagcgaaagcgctttggagcttcttggagcgcaagcgctgggcgctacaagcttcccagagctttacttcttccgtccggaacgagccggcggtaggtgctcctgcccgcagcatctcagcagagcggggctcggctttccaatcagcggctgcgcgcggtgcaggcaacttgcagactgaggccccgccccatcatcgcgcaaggggcgtgccggcgcccagagcaaacctgagcagggcaaatctgcccagagacgacagagggtcctgccctcaatctggg

SEQ ID NO: 51572 - DNA, 359 bp, Mus musculus
  source 1..359: mol_type = other DNA
ggggtaaagcgaaagcgctttggagcttcttggagcgcaagcgctgggcgctacaagcttcccagagctttacttcttccgtccggaacgagccggcggtaggtgctcctgcccgcagcatctcagcagagcggggctcggctttccaatcagcggctgcgcgcggtgcaggcaacttgcagactgaggccccgccccatcatcgcgcaaggggcgtgccggcgcccagagcaaacctgagcagggcaaatctgcccagagacgacagagggtcctgccctcaatctgggggcagcttgcctgagcaagccatccagctccaccagctcgagcgggttcccgggactttacgcgcacgc

SEQ ID NO: 51573 - DNA, 329 bp, Mus musculus
  source 1..329: mol_type = other DNA
agtgctgagctggaccgggcggcagcccctccctctccgcaccccagcagcagcaactgccttcctcgctgaggctggaggaagcgctctcaatgaaatggataggattagccagtaaatctcttccgcgcagccctgacttgcgcgacgtgagcagccccgggcaagggcgcgtcctcgtgggtggctccaagaggggccctaggagggacacatgaaaaggcccgactgagtcctctcctttttccagtttctataaaatgatgcttaggcggcctccgtgttaactgggccaggggatgggggtgggggactggttccctcccctt

SEQ ID NO: 51574 - DNA, 290 bp, Mus musculus
  source 1..290: mol_type = other DNA
ctgagaatggaacctggtgcctcaccatgctctgtgaaggccctggcactgacccagggccctcactgcaagtgcggtgtaggacaaagggccagagcctctgggttcaaaatctgtgtaagccctagttttggaaaagagggacctgaagtcactttaaccggcgcttcctcaaggggcgctcaacccacccgcaaattgacaggcgccatctgctggcggctgtgcgcagcaccgcgaccacggcagtgaaagccgcgggacccaggcgcgctccccgcgagggcgtc

SEQ ID NO: 51575 - DNA, 381 bp, Mus musculus
  source 1..381: mol_type = other DNA
gtaagcagctcccttctgccctgacctccctccttctaagctactgtgaagtagctttggctgtggtggtcgtcacggcagcagaaacctgagcagcagaggtcaattaatcgattaatttatactttttcccataatattttcagcacagtgtcatttattattattattattattattattattattattattattattattattattgtcattttgagccagggtctcactctgtttgcttggcatacaaggcacagcacagcctgtcttcttctgcagtcaatgtcagtcactctctaggaaggacaacctactttgttctaggacctcatattatcacacagtgttagcaaagtgtctagcaacaaatgatgcaaa

SEQ ID NO: 51576 - DNA, 411 bp, Mus musculus
  source 1..411: mol_type = other DNA
ggtaccattccagctgatggctctgttattcagcctggcacagtgtgacaaacctatggctgtaattccaggcattatggaatttaacagagaagaatccacaagagcaacgttgggctgatcaacttctgtattttcattggaatatcgtgaatgtagaagactcctgcatggggaaggtgcatgagccagcaagctcttccatgtgagcttatcaaaacctaataagggaacatggcttgcattttacctcacctgaggcaccccagagggtcagatgtaacaaaacatgatttctctgtctctttgtaagaacagtagatttgaaataattatcccaaagttgtctaggcagtctgcagtttagaaatagcctttgtaaacaaagtctacccatggttcctcacttgg

SEQ ID NO: 51577 - DNA, 522 bp, Mus musculus
  source 1..522: mol_type = other DNA
ttgtgttctccacagaatgcagaaaactcagtcttctataagcaagagaacccacaatggttgctgagacttaagcctcagactcccacacttttctgaaatgtcacataagggggaatttggaaaatccagtagtttgtgaaagaaagatacttttctaagttagaaaaaaatcctttctacctgacactaaatataaaaattaaaaaatattttaagaataactgagctaagcactgtgcactcctctaggtcagataggtcctcacagctctgtgttccatctggtacaaagccattgactgaccacagtctgtggggaagtactctgcacaatgcatacagttatgaagaacaatattattgttgcacagagaaagagtctgacttagaacccacttcttcccaggcactctctcgggtctactctgagtagagcctgcagcaggttcagggagttcccctagcctcttccagaaagtctgcagctggcaactttgacgtcatcacaagagaattttc

SEQ ID NO: 51578 - DNA, 482 bp, Mus musculus
  source 1..482: mol_type = other DNA
aatcaagaggctaaattctgcttcgtcattgcacagccttcagttctagagatggtggcaactttcccactactctggcagtaagcgccaggctaaaggtgcctggctgacagtcagagctggcccattaaagtgtttcagttgcaactggatccagcattttaaaaaagaaaataaattgatcctttaaaaaataatatataatttatacccagaagaagttatatgtgtatacaatgtatttaacaacccaaagcaaaaccctactctccttttgtttgtttggttttttgttaattagagacagaatcttactattagagcaggctgacctttctatctcacagagatccagctgcctctgcctcctgagtgctgggatatgaggcatgggccagcagcccagacaaactgaatctctaactagcaactgatgatgctggaatccagtggcaaagcagtgacctgtctcttattatctt

SEQ ID NO: 51579 - DNA, 526 bp, Mus musculus
  source 1..526: mol_type = other DNA
aaaacataatcaaagtgtattctatgaagttttctttttaacaaaagttttaagagatagcactaaaaactcactcaatgaattgtagtgacatttattgcagtacttcaagaaattaatcttggagttcctattctgaactgtcgttacttaacataatgtgtaatcatcatgcaacatttcacaaatactatgattgtattttatactgtaattcacacttttatgcacacattagcaaagagttcttatgacctttcttaggataaaactgggactggactctcacaggttcagttagcctgaggcagactgatggtgtcaaggctgccatcaatcagaggctcagtagcgtccatgcaactgctgcagagccacactgatcaaagcttctaggctctgagctgaagcagtctgtctgcttatgaccagcaactgatgctgctggtgctcttggctgctgattggttcttcagcactgaaggtgcccaacccagcaccagtgggtgcacccttgccagtcagc

SEQ ID NO: 51580 - DNA, 195 bp, Mus musculus
  source 1..195: mol_type = other DNA
tcaaacctatcctgatagaatgggactcagcagagcacagatcctttcaaataacacttctctactcggagagtacagtgccaggatcagggaacaaagatactgtcttccagacatgacatgacattgactgaacttgcagtggctgcagatatatgccttcccaggccagctaagcgatgtagcatggatggg

SEQ ID NO: 51581 - DNA, 307 bp, Mus musculus
  source 1..307: mol_type = other DNA
ttacactgttatacactgtaatgaagaacaaacattcttctaaataagtttaaaactgctcttcccagctcttgaaagtggatctggagatttaggggattatatcagaaagcttattacatttcttgggtgaagcctttgttttccagtaaaagagaaagaacaaagtgatgttctggtctaggttgagtatctgatagacagtcatgctctgcactctgagggtccacagactccgtgttccactgccagatgtcaggtcacctacctgctggacagggcatggagcagggtccagcctgcgtgc

SEQ ID NO: 51582 - DNA, 383 bp, Mus musculus
  source 1..383: mol_type = other DNA
tccagggaacccgaaggtctcttctggactccaaggacacttgtgttcatattcacaacttaaaaataaaataattctttaaaagggaagagaaagcactgatttgaatcctcaaaattctagctctaagattgaacaaaattgtacatatcacaattgtacatatcacaatgctaacaaaagaagcttttgaaagaaatcattccaagaaaataattcccttttaagtgaagatattcactgagaccgtgtgactttcagcagtgcactggctgcccttacagggaccagggctggtttccagcactcagttcacaactgaaatacattttaaaaaatgcaagcctattggaagtatcttaaagtggctttcaagttcctat

SEQ ID NO: 51583 - DNA, 324 bp, Mus musculus
  source 1..324: mol_type = other DNA
gctcttagagcatgtgaggtctgtgcatgctcacagaaaacatccatagtaacaaggggcctggacagtgaggaagttagctccttcctccctccgtacccagcagctcagaacctgagcaggggcctctggggagccacaggttgctagttagaaattcaatgttggatccagttgcagctgaaacatttcaaaaagctgttaggacaactgttaagtgatttacgtgcacccacttcaggagactcatatcctagagctggagaaggctgtggcgctgtggacgcctccaggagcagccatcctagctaagctcagcctctt

SEQ ID NO: 51584 - DNA, 207 bp, Mus musculus
  source 1..207: mol_type = other DNA
tggctgcttaccccagatagccatgtgttaggggatgcttgtatgcttgcaagcttcccactgcacctttgttatcaacacacggtgtgaataggaattgtttacctttttaacataatcgtaaaatacctacttaatctcttgagttaagagtccagactattagaaattattgtaaaggccaatagtttgaatctcatatgtgag

SEQ ID NO: 51585 - DNA, 322 bp, Mus musculus
  source 1..322: mol_type = other DNA
caggctgtcttcgaactcagaggacagctgggtaaaggcatgtgctgccacaagtctcgatgccccgtgtgaagacacatcccctttggaagccataggctggggtacatccaggcacctggagtccaaagtccctggcaggttgcagaaactacgtgtttcaggaagacatacctttactggagctagatctaagctcatgacagacatgagcagctcctgatgcttaaaatggattcaataaagttgtcttttttggtgaaccttcacctcttcctagctttcagtttccgtggctgaaagggcactgcttgaataggca

SEQ ID NO: 51586 - DNA, 171 bp, Mus musculus
  source 1..171: mol_type = other DNA
attatgctcagtgagtttcagcaggtcacctccatactaagcttggtcattatcacagagactatgaggatacggctggtctcaaaaccaaaagccaggacagggatttgtgatggcctctgtgtctctgaagatcccgctaagaggagccagagcctctgccctgagcaa

SEQ ID NO: 51587 - DNA, 314 bp, Mus musculus
  source 1..314: mol_type = other DNA
ttgttattggtaatgacaatattttacattcctctctgaaggaaggccaagcctccagactcgggaagcctgggttccgtctccactcggaggagggcccagcgtcctgtctgtaacctcagcacccaggtggcagctgcagaaggatcccacaggtagtgagatcttgtctcaaaatacctttttaaaaaactaacaccccgggctggtgagatgcccgactgctctaggtggcgtgtacttacatataataaataaataaataaataaataaatctttaaaaaaatgggttccagtcctgtgaaaaggaagc

SEQ ID NO: 51588 - DNA, 114 bp, Mus musculus
  source 1..114: mol_type = other DNA
gattccagtaagccttagtaaaccagagctagctgatatggctctagaactgattgaagggcaatgcttggggcagtgataactccagccccagtcctaatcaggatcagtctt

SEQ ID NO: 51589 - DNA, 115 bp, Mus musculus
  source 1..115: mol_type = other DNA
ctagaactgattgaagggcaatgcttggggcagtgataactccagccccagtcctaatcaggatcagtcttccactcctgcgtcctcccctggggcaagagaggggctgaccagg

SEQ ID NO: 51590 - DNA, 459 bp, Mus musculus
  source 1..459: mol_type = other DNA
tgtctcaggccccaaggcagaggggcccagaggcggtgaagcgactcttaccccgcccccgaggcctggggcagccgctctcagcgatctggccagaggccagctcccctcctaattactggctcattaagcagcggctggtcccggttttaattaagtcgaacaaggagaggccggagtccgcacgaccatggcctcggaacccaggtggccgagacaccccagcgccgtctccccggccgcccggccgctccccgcctccacccgccgccgccgccgccgcctggcctgcgtctccctccgccgccgggggccggggtctcctgtgggggtgcccaggcggcaccccgggtctccccttcagtgccggggtgaacccccgaggggagccgggaggcgggttgccgggcggggttggggcggagggagcagcggccccagcgaccggcggggggaggg

SEQ ID NO: 51591 - DNA, 307 bp, Mus musculus
  source 1..307: mol_type = other DNA
actcagtgattttgaaaaagtcaaaaggcttttgttttgttttttaaactatttgctaaaaaagtctcagccctgaacatcctcaggatcttcaagacttttctctcctcacttgaaagaaagaagtggcagttttaaataaagatatttctttttccccggtttagttgagatttttttttttcaaaagaaaagaaaacaaaaaaaccaatagagccctaccccagggagtagtacctgaaggactcttgtcccagaagcacagattcctggcattctctgacagaacgccccacctagggcagtg

SEQ ID NO: 51592 - DNA, 269 bp, Mus musculus
  source 1..269: mol_type = other DNA
cactgtggtctgctgtgtcacattacaacggtgggtgagggctctgctccccgcttctccgagagggaggggcggacccaaggtcttccctctacccaggccgagtcgaggcctttgcccggtcgcatgccagccaatcatttgatttggaaccattcgctgcagctgaactgacgaatcaaagcctctttagctgagtggcctagctcattatgaccaatccctcggcagtggtaggggccccacacagaaaaacttgaagtttgccc

SEQ ID NO: 51593 - DNA, 292 bp, Mus musculus
  source 1..292: mol_type = other DNA
tagatacgcggcacatcccatgaattcagctatagcctcaaactcggatactcagcatacaccaccaaaagccagcggccagatcgtgtgtgtggctcctttatctttaaagactaatgaattcagaaggtacttcataaagggagccggggtcaccggtgctgaaaccggtggcccgagcgatgaggctgaccgaggccgcgagcgccactgagctccctggggcggggccagcgagaggcccggcagcgaggcccgcacttcctggccagccccggaagtcagcaggcgc

SEQ ID NO: 51594 - DNA, 309 bp, Mus musculus
  source 1..309: mol_type = other DNA
aggtagaattggcctgaagtctcctacagtacatgttggcctggtgccagggtcacgctgtgtgggtgaggcacacaagtttatatttttaggtatcataccagtgtggtggcacacacctttggtcccagcaggcctgttcaggtcccaaaaggcatgaaaggtcttttgtcagactgaggtgacagcatctctggcagccatgtgccggctttcctctgaaaggaaggaagagcagagacaggtatagaactgcctttttatcgcaggttctgcacgctccctggcaggcattaaaagttccttgta

SEQ ID NO: 51595 - DNA, 295 bp, Mus musculus
  source 1..295: mol_type = other DNA
gtccttgaagcccacggggccccacgcccatataaggtgggtccggcttgaggggcctggaggactctcggcgtctccggactggcactctggcctaacacaagcctggcgtccagcgatagaagcgggagtcctggaaatgcacccaatgtgccgcgttgcaggggacgctcgccctgttgccagggaaagtcccggacgtgacggctttgcgcgacagaccaggtgggagtttccactctcccggcctttgcagagccgagatcctgggccttgggacaaagtcccttgggcg

SEQ ID NO: 51596 - DNA, 323 bp, Mus musculus
  source 1..323: mol_type = other DNA
attgctaagtattccctggcactccggcgcgccgtaggggtcacgggtaggccgagtggtgccagcgcccgcagcggggaggaagtctgcctgcactggcagggtgtccttgaagcccacggggccccacgcccatataaggtgggtccggcttgaggggcctggaggactctcggcgtctccggactggcactctggcctaacacaagcctggcgtccagcgatagaagcgggagtcctggaaatgcacccaatgtgccgcgttgcaggggacgctcgccctgttgccagggaaagtcccggacgtgacggctttgcgcgac

SEQ ID NO: 51597 - DNA, 431 bp, Mus musculus
  source 1..431: mol_type = other DNA
attgcttgtttgtgacagaagagttcttggtccagtcagcaaagacacagcggtgactccctctacagaggttacaccagttgagccttttttgcagaaaaggagaatcagaaacacccctttaggattttccaactctctccagagacagttgctctaggacaaagcccctctggtggcgtcctggagagcagtctccaaagccctggcttgagcaaccgtgcatggatcagagggaaccttggacccatcccggttttattaagttcagattaaacaaattgctaagtattccctggcactccggcgcgccgtaggggtcacgggtaggccgagtggtgccagcgcccgcagcggggaggaagtctgcctgcactggcagggtgtccttgaagcccacggggccccacgcccatataaggtgggtccgg

SEQ ID NO: 51598 - DNA, 263 bp, Mus musculus
  source 1..263: mol_type = other DNA
ttctgcaaaaaaggctcaactggtgtaacctctgtagagggagtcaccgctgtgtctttgctgactggaccaagaactcttctgtcacaaacaagcaataaagaaggtacctgtgtaccacacctggagaaacctagaactatcttgcaggatgttcatcactacagcgagtctttgcgggagaggctctagagatttccatgacaactccaagggattcggggggagacttctgaagctctccccgctgctgctgctaccgc

SEQ ID NO: 51599 - DNA, 289 bp, Mus musculus
  source 1..289: mol_type = other DNA
atcatcaatgaagctctgggtgtgatccacagtaccacataaatcaggcacagtggggcatgccgctggtccagccggtgcaggcagtttgcccagcaaggctaccttctgtagggaggaggagagctgttctctgccgctcctctcactgtcactgagggatcacactgctaaatttgatttcagctaagatctcgcagctaaaatctcagcctttacatttgaactgaagctcgaacttagggtctttagcaatgctatagaggcgggacaaggaacctcttcgtgc

SEQ ID NO: 51600 - DNA, 351 bp, Mus musculus
  source 1..351: mol_type = other DNA
gagtcccgggaagcgtatccacctccgctgtggcaaacgccagaacttccggatgtcagggagttgcatcccagcaagcactgagacagggcttctctgtgtaacaaccctggcaggtcattcgtttattcattaataattcattcattatgcgtgccacatgggtgcagatgtttgcggacaactgctcaagcatgaacactctagcccagatgccggaacctaagtgctaggaactacatttcccacaatgctagtttctggggcctgtacggcgcacgccagcggctgacccgtgccattggcccggcatcaggacttccgggacgccggttttcctcagggccgcgg

SEQ ID NO: 51601 - DNA, 298 bp, Mus musculus
  source 1..298: mol_type = other DNA
tgaggagccaatgctggattctgcaactcactgagtgaggttcctggaagtgccactccagggtggctgagcaagtcaccgcagtgggtgccaggctctactgctgcaagctgggctaccaaactctgccaagcccaacttgaggcttactcaggccaaagcagaaggctgccttgagcacacatgggcaagcacatgtattcgtacattttggggccaagatttctacagagaccctgggctccccagctctgggcctagggccagaaagggaggggcaaggtccagatcaaactct

SEQ ID NO: 51602 - DNA, 350 bp, Mus musculus
  source 1..350: mol_type = other DNA
gtggccagcttgcctggatgaatcagggaggtgagccctcaggggtcttgtaccttggacagaccaactgaggctgacctgtggttacctcacaaggtaccctggtaaagttaacagtagtggtaataaaatcaataaaatataatacccaaaaggcgtattgggcagagactgctattcatttcttttctctagaacaaatgcacttgggaggggccggctccagtggactctccgcctacttctgactgcgatacagagaggtcagggggtcccatctttgatccacagattctccaaggggactgtgccggctataaaaggccatatcagggccctgcacaagtgct

SEQ ID NO: 51603 - DNA, 374 bp, Mus musculus
  source 1..374: mol_type = other DNA
catcagtgaagccgagattctctcattcccggactcgggagaagactggactaaattctggattttgaggagccaatgtgcaactcactgagtgaggttcctggaagtgccaccccagggtggctgagcaagtcaccgcagtgggtgccaggctctgctgctgcaagctgctgaagcccaacttagggctaagcatttcaccatagttcctgaatacactcacacattggcaagcacatgtattcgtgcacacacatacacacaaaagtacttggtactgggaataaacaagtacaagattcaatttgggaccaagatttcttcctccccagctctgggcctaggaccagatctcaaggtccagatcaaactct

SEQ ID NO: 51604 - DNA, 426 bp, Mus musculus
  source 1..426: mol_type = other DNA
ggtcgtcggagccgccgcaggagggaggcccccaactacactgtgtaggcgcaatggcaagctggggctgtctggcatggccatcgccctcctgagtggattccacgccctgagggctagggtccctgaccgttacgtgagtcactttgagactgacgggctgtgtcaggtggccttagagaactcacagcttccacatgtcaggccggggctgtgacctcagaggtggagtccaccgtggacactcactgggagactctgagggcctgctcgggcacctgctcctgggaaaggatcagagtctgacccacaggaagtgcctgtagcacacagaggtcctgggacaagctccagaggccttggctggagacaaggccatggcaagcagtccaaggcaaggcattgaaggcagccctggcttggccc

SEQ ID NO: 51605 - DNA, 426 bp, Mus musculus
  source 1..426: mol_type = other DNA
cagaagagaaagccgggtcaccaggtcagcttctgcgttgcaccgggctcacccctccagctggttccggtgttccaggacccagcgcagcaaatggtcctctgaggtcaaagtccgggcctgggccgtactgcctgcgtgtcaggagccgggcgcctcgttcccacccacggaccaacgaacgcggcgagctttttgggggttgaagctaagacttggttacctcaaagccctcgaggctacggcgtcagggccgcacgcgctctcatccgccctcagcgtcggagtgggcgaggtccgtctgcaccggagcgggaacccaggcgggccactcgcgcctcggcgcgccccagtgagcgctctggtcgggagccaatcagcagcggtgcgggcgacggaagtgaggctgccttcgcagcgctgtgc

SEQ ID NO: 51606 - DNA, 529 bp, Mus musculus
  source 1..529: mol_type = other DNA
taacagccatcacctgtcagatgtgacatctgcctgcagttccaaacccctgggatttgccgagtgccctcgaggctgcgggtcggagaggtcggccaccgtccggtctggcaccagactgtacacttcctcagcgcgatgggcggcagcgcatcctcgaacagcccccggggaacagcttcacgagctcctcgatggcctcgcgcgccgagcctgtggtggagcaagcgcgtgagcgcggaggttcggacgccccagccctcagagtcgctgcccagcgcctgggttgccatggtgtggataccccccgctctcacgggccccggcgcccgcctccgcgagccgtctcttgcgattcataacccggatttcaggattccgggaaaggagtcccgaagaccgcgtcttccggcacagcgctgcgaaggcagcctcacttccgtcgcccgcaccgctgctgattggctcccgaccagagcgctcactggggcgcgccgaggcgcgagtggcccgcctgggttcccgctcc

SEQ ID NO: 51607 - DNA, 490 bp, Mus musculus
  source 1..490: mol_type = other DNA
ccccttccggtaggaggcaggaggactcccatggccttacagtcagcccaggtgtccccagagtctggagaagccgggcgtatcaccaacatgttggctcctggttctgtatggtaatcaaccggctccaaggtccagagccttgggggaaagcactccctgcgacgccaaggcgatggctcccgacccccatgcccaatggggttaggtcagccaacctcggggtccgatgggcagagaaggcggccgggcccgcgtagcgctaaagccctcacctgagggggcggcgcccgggcccgcggtctccggcgccgccgcgcgggctactgcgcgctggctcgcggcgacaaggcggcgagtcgcagtgacttccgcccggccttgcccggctccgagtcaggcttcggcgccgctctcgcccacgctcccggcggggagtggtggaggagggggcgtgtcggaagtaatttcaacttccgcccttctcggg

SEQ ID NO: 51608 - DNA, 408 bp, Mus musculus
  source 1..408: mol_type = other DNA
taataagtcattctgccacatagccctggctggcctagaacttggtatgtagatcaactgagctatgcagagaaggcctccaggggcagctctgagagctcgcgtctccagcactccccgctccgacctcctcctgtgagcagggttacagtgctctctggaggccctggcacgttcagcagctcccaacggtctccatcatcctggagccgcggcagctcccgagcagcccggaaactcagagtaaccacggagccggccccgccccgagaagggcggaagttgaaattacttccgacacgccccctcctccaccactccccgccgggagcgtgggcgagagcggcgccgaagcctgactcggagccgggcaaggccgggcggaagtcactgcgactcgccgccttg

SEQ ID NO: 51609 - DNA, 448 bp, Mus musculus
  source 1..448: mol_type = other DNA
tgacaaacgatgacaatccttgcaaaggttagtctgatcctggacttccagggagaaggctacggtgtccctgtaaccggttagcaagcactccaaatgctagtgtactgttctggacaatactgtcttttctttggagatacaggttcttccaggtgagaagcaggacccggaggggcctccctgccagggcacaattcttagagtggggccaccactatctccacccttcatggttcctccaacaaaaacttgcgcaagaaacctccacgtggtgtcctgcagccctggctgaggcagcacctggatgtcctggctaaatcttgggccccgggagcccagagacagtggcaaaagctagggaatccccaggattggaatttcccagttatgtaattaataaaaatcaatgatttccacatcgattccaggaaggtcagagtccttg

SEQ ID NO: 51610 - DNA, 389 bp, Mus musculus
  source 1..389: mol_type = other DNA
caggttcttccaggtgagaagcaggacccggaggggcctccctgccagggcacaattcttagagtggggccaccactatctccacccttcatggttcctccaacaaaaacttgcgcaagaaacctccacgtggtgtcctgcagccctggctgaggcagcacctggatgtcctggctaaatcttgggccccgggagcccagagacagtggcaaaagctagggaatccccaggattggaatttcccagttatgtaattaataaaaatcaatgatttccacatcgattccaggaaggtcagagtccttgctgcacctttcagtccatggaaagcttcattccgggaagcagtggctgcgtgcgcagggtaggctggccaggctgcagatgcc

SEQ ID NO: 51611 - DNA, 394 bp, Mus musculus
  source 1..394: mol_type = other DNA
catggctgggccaggcctgtgcatgtgggaggcagaggctagcctgggctacagctacttagaaattctaagtccatctaggttatgtgagatcctgtcgaaaaaacatgatcaaaatatattgtatgaaaagagttcttttttttttcaataaataaaagtgtatctcaaacttcaaaatgctgtttattcttctgaatattttcagggaaggacccaggaaagaaaagaagttctaggaacatcagtttcaagtcctcagaagctattctggggaagacccagtggacaaacgttttgcagggcttgtgtgcttaatgcaagccacacaaggccaaatatgcttgcttcagtgtgtgtgcccctctagcgagcgagcgagcgagcgctgtct

SEQ ID NO: 51612 - DNA, 541 bp, Mus musculus
  source 1..541: mol_type = other DNA
ctagccttcaagctctattagtaccaatataaataattgcacaatttgcaagattagtcattacacagtgaaggtgaaacgcactaatctttcacagtatgagtggggttctgtgaaattctcttttagatcaggactacgcttcagaagatggaaatgtggccgaactgtgcacacatggtaggccaccggcaggtccaaggctctgggaggtggcctgactcgcacagctgggcgggagtgacgccttgctaggtggccgcgcagattgcgcagttcccggggagcgcgcgcgctggggggcgcggggcaggcggggctagcggggacgcgctggggcggggctctaggagccgggggcggggccgagtgcgcgggccttggcacgcacgcgcagacgggccgcgggccccaggtatttccgctctggcggacaaataatcctggccaaaggggaggcccgactgtccagccctttaaccgcgtgggggtgccgggggaaaggggggtcggggagggggaatcctgctcctttaattcc

SEQ ID NO: 51613 - DNA, 432 bp, Mus musculus
  source 1..432: mol_type = other DNA
cacacagtgattggcaacagccatgggccacaggtgaccagtgggcatctgttgcatatttttgctcaagttttaaggaaagttgaaataccagctaaacttatagttgattacctagaagactacaattgaaaagtttttactaggacttaatgcggtatttgggcagaaatagttactgtcaatatccgctgcattcagttgacatatctagtgcaaccgaatctggcggggacagggaagccacagcccagtcgagcctcacccttgctcccggcggagcccaggctaggagcgaacgctctcccctacaggccccagttctggacctccagggccattctggggggcaaaaatggccaagaggcccgcagcggctcctttaaggcgtcttctcgccctccctccttgtccacgtgacccggggcggcc

SEQ ID NO: 51614 - DNA, 660 bp, Mus musculus
  source 1..660: mol_type = other DNA
atagttactgtcaatatccgctgcattcagttgacatatctagtgcaaccgaatctggcggggacagggaagccacagcccagtcgagcctcacccttgctcccggcggagcccaggctaggagcgaacgctctcccctacaggccccagttctggacctccagggccattctggggggcaaaaatggccaagaggcccgcagcggctcctttaaggcgtcttctcgccctccctccttgtccacgtgacccggggcggccgcgcgccggctcggccccccgcgcaagcggcgatggcggcggcggcgggagctgctgcggcggcggccgccgaggtgcgagaggcgggtgcatgcccgcgcgcgcgcccgggggaagcgcgcgctcgtgcaatgctccgggggtgcaacggggccggggggcccgagccgggaggtggggggagtgggcgccgagtcgcacgtgccgccgcccgctgcccctgcgtgggcggtgggcaccgcgaccccgggagcccgcgcgaggggcgcgaggggccgtccgccgggctggggcgcagcgggcgtgtggccggggtccccgcggcctgggggacaaagggggagcggcgcagccgggaggagggggcggggccggggcgcggaggccccgccccctccc

SEQ ID NO: 51615 - DNA, 271 bp, Mus musculus
  source 1..271: mol_type = other DNA
aagtatcacctgccagtgtggctcgccctggagcagagccgcctggcccggctggacccccacccggagctgctccctgggccgggcactgcccttcagacatttctccctctcccagagctggtttctcactgggagtgcaatgagcctggcctcagttagctgattgaagttacaacctagaggtttgggtgtgccacctgctgcggtccgtagcagacccggtaagcagctcctgggacccagttctgagccctggtacccctgggct

SEQ ID NO: 51616 - DNA, 382 bp, Mus musculus
  source 1..382: mol_type = other DNA
cctttttttttttttttaattaaaatccaaattgctatagcataagcagggctgggacacatgcctgtaatcggtacttggtacaggcaggagaatttccaagttatctgtgtctgtttagagacagaatttttctgtgtagccctggctataccaggctggcttagagggtttctctgtgtagcccaggctggcctcgaactcagaaaggcacactcctaaagaaaagtgccttttctcctcagctaggagtggggcttcccaaccctaggatagccgccggttgctttaaaacgcgttagagccagtcaaaaggctcacacagactggggccgcctctgggtccgcggcagcgcgggctgcggcccccaagggagggccg

SEQ ID NO: 51617 - DNA, 272 bp, Mus musculus
  source 1..272: mol_type = other DNA
acaatcaatctaaaaatatttcttaaaagctggccagtggtgttgtatgcctttaatcccagcactcagggcagcctgtgtcacgcctgtaattgtaggcatggttggaacccatcttagactaagagcagaagctgaggtgcaaattcagattttcctgggtagactagagctgacctatcctgtaggagctccagggatgatctacttaggacagtaagaaacatgattcctctttaggacccccgggccaggcgtgggtataaatggcc

SEQ ID NO: 51618 - DNA, 305 bp, Mus musculus
  source 1..305: mol_type = other DNA
gcaaagagcaatttatttcctctatgctgcagcctgaggcaaagggaggctacagcctggagtcacaggtcctcctaacatgagaatcaagtcacgctgatttccttataaaattgtgagaactccataggcgatgactgcaagatctcttctatttccctatttccacaggcgcccctgcgtaggaaggatctagcgaaccccagaaacctctggagagttctggacaaaaactgctggaagattcctggccccaaggcctcctccggctcgctgattggcccagcggagagtgggcggggccg

SEQ ID NO: 51619 - DNA, 222 bp, Mus musculus
  source 1..222: mol_type = other DNA
ggggatctgtgtgggagctccacccaggcatctcccttcctaaacttggcggggagaagttttagcccttaagttttagcctttaacccccctgtgcgagttggcgaaaccaagtgaaccccagaaacctctggagagttctggacaaaactgctggaagattcctggccccaaggcctcctccggctcgctgattggcccagcggagagtgggcggggccg

SEQ ID NO: 51620 - DNA, 464 bp, Mus musculus
  source 1..464: mol_type = other DNA
ctggttcttggcggcgtctccgatgaggcgctcggtgtcggtgaaggccacgtatggcgatgatctccaccttgccgtgctggaacacgcccacgcacgagtaggtggtgcccaggtcgatgccgatcgccgtgttcttggccatggcgccgcgctctgcttctggaaggctgcgctccgcggcgtggatgctccggggaaagttgcgctccgcggcagggacggctggtcctggccgaggatcgggaacgcgccgctcgctctcggccccgcccactctccgctgggccaatcagcgagccggaggaggccttggggccaggaatcttccagcagttttgtccagaactctccagaggtttctggggttcacttggtttcgccaactcgcacaggggggttaaaggctaaaacttaagggctaaaacttctccccgccaagtttaggaagggagatgcctggg

SEQ ID NO: 51621 - DNA, 332 bp, Mus musculus
  source 1..332: mol_type = other DNA
acaaccagcatgttacaagcctggtaatgctgttcccagaacatccatagttgaaattctacaagcatctgttgctcttgataaagtaaaatatttctgtcactgagttccagtcagtttagtcctttacagacgagtcctatgccaaattatatatatatatataacattagagctggacactcacacacaccataaccagtgtgtattggtgtatattttattctctgacactctcaactccaggattccagttgggcagctcttagcaacattttaaattttactaaagaatacgcaagcccacgcatgcgcttgtgagaaagcggctg

SEQ ID NO: 51622 - DNA, 439 bp, Mus musculus
  source 1..439: mol_type = other DNA
gataaagtaaaatatttctgtcactgagttccagtcagtttagtcctttacagacgagtcctatgccaaattatatatatatatataacattagagctggacactcacacacaccataaccagtgtgtattggtgtatattttattctctgacactctcaactccaggattccagttgggcagctcttagcaacattttaaattttactaaagaatacgcaagcccacgcatgcgcttgtgagaaagcggctgctcgggaggaagtgggggggacaggaagttccgcccctctaccgcacgcgcgggctcgcgctccggctcccgccctgcctccggctcgcagtccccggcgccttccttcgcggtccaggccgccccgcgtggcgccagcaccatggtgggagggagcgccgccgctcgcggcgggcggttcgaacc

SEQ ID NO: 51623 - DNA, 341 bp, Mus musculus
  source 1..341: mol_type = other DNA
tcacgtgactccatgtcaggcagtgagcgctcaagcagccaggcactgcttgtgaaagacccccaagctgggtagtcaatcactctgaggagaccctgggtacccgggcgactcagtctatcggatgactggacctgaactttccagatcttggccctgagccggggcccaggtgcttgaccacagaacttttgagaactcagctctggtactttatcatgccttgcaaaacttggagcagcccgagattctgcagctcgccctgcaaaggctttcgttttccctagacacgaagaccccgggctgcccgcggcggcgcctgacccgagggccacgggctg

SEQ ID NO: 51624 - DNA, 495 bp, Mus musculus
  source 1..495: mol_type = other DNA
agcagccaggcactgcttgtgaaagacccccaagctgggtagtcaatcactctgaggagaccctgggtacccgggcgactcagtctatcggatgactggacctgaactttccagatcttggccctgagccggggcccaggtgcttgaccacagaacttttgagaactcagctctggtactttatcatgccttgcaaaacttggagcagcccgagattctgcagctcgccctgcaaaggctttcgttttccctagacacgaagaccccgggctgcccgcggcggcgcctgacccgagggccacgggctgcccgcggcggcgcctgacccagacccaggctcgtcccggcacgcgggttcccgtctccgtgctgcacgagccactctggcccctgcttgacccgtccggcagcggtgggccgcgcacggaccctcgggatcgcgcacgcacaggcggggcccggcagccctgcgaggacccgagtccggaaaaaggg

SEQ ID NO: 51625 - DNA, 552 bp, Mus musculus
  source 1..552: mol_type = other DNA
gaggccacaggtgccttggcctcggcagtgtcgggctacgtgcaggctctggccagtgcgggcgtggtggctgtcctcgccctgggtgctcctgcaccgcagggctgcgctgtagctgtggcttctgaccgctgctccatccacctgcagctgcaggggctagtggacccagcccgggagttgggcaagctgccagcggcaggctcagcggctgcaggagcgccgtgctgcctccagctactcaaggtgccccttgaggtccacaggcagcctgtggactcctggaagccgctgcatggggtcaccacatacctcttttgcacccccagttgcaacagaaggtggatgaggccatcgccctgttccagctgacctagggcttcccaggagcagcaggagaactgccggctcctgcctggccctggtcctggtgggcagcaggatgcgtctgcctgggtctgtctctggcacagtgccaggcctgagtcacggtgctctgctccccagttcacctcactgcactgcactgcgctgtgcctgcggaggcctgcc

SEQ ID NO: 51626 - DNA, 330 bp, Mus musculus
  source 1..330: mol_type = other DNA
catccagatggatcatcagtcagggtgatcatctcctgtgaaacaggagttagttcttacttccacttatttagttttttataaatattaacttagtgggtacaaatattaacactcttcaggaaggaggaagactgcctcctttaaggctccccgtggcccagagggaccttagtttagggcgggctccgcccaacatcacagagggcgggaattttgaacactctagcttcccgttggatggctaagcagaccctttcagccactaagggggcggggcgagcgcgcgcggcccacgcctacaggctgcaggcttgcggcggttggtcg

SEQ ID NO: 51627 - DNA, 390 bp, Mus musculus
  source 1..390: mol_type = other DNA
cagcagccacactgtcctgcagctgccaggcactggtggctaacaggaagtgctgcctgagccccggggcctaggaataaagcttattttagatcaaggtgtttccttctcagtgattagaggcactgactgctcttgcagagaaagtggctttggttccaagaaccacatggtgggtcatcaggggctattattaaataaatggccagcctggtctatatagtgagttccaggctagctaggctacacagggagaccctgactctaaataaaactttaaataaatttagattctgtccttgggactcaatgatttaagggaagctatctgttgccttaagaattatcctggcctcacaggctgagatgggttggggagggaccagcccc

SEQ ID NO: 51628 - DNA, 333 bp, Mus musculus
  source 1..333: mol_type = other DNA
gatcagcagaaggtcacctcatattttaaaaattgaaggtacttttacctgctaagcccatccagatggatcatcagtcagggtgatcatctcctgtgaaacaggagttagttcttacttccacttatttagttttttataaatattaacttagtgggtacaaatattaacactcttcaggaaggaggaagactgcctcctttaaggctccccgtggcccagagggaccttagtttagggcgggctccgcccaacatcacagagggcgggaattttgaacactctagcttcccgttggatggctaagcagaccctttcagccactaagggggc

SEQ ID NO: 51629 - DNA, 259 bp, Mus musculus
  source 1..259: mol_type = other DNA
tcactgatacagagattacgcaaatttgtaaggcataaaaaaataggtagtaaagttctatctttatactaaatcaaagtctaagcttggccaggcttccagaggaccgccccctgccgtgaagcctgggctcagcgcatcaggcctcctggcctctggcggcctgtgtctccctgtttgatagtggccacccttctcattaacggggaatcgaggaagcccccggacttccctgtcccgagatgtcccctccccaggt

SEQ ID NO: 51630 - DNA, 248 bp, Mus musculus
  source 1..248: mol_type = other DNA
tcaaagtctaagcttggccaggcttccagaggaccgccccctgccgtgaagcctgggctcagcgcatcaggcctcctggcctctggcggcctgtgtctccctgtttgatagtggccacccttctcattaacggggaatcgaggaagcccccggacttccctgtcccgagatgtcccctccccaggtccagggcggggccggccggtgagtcagctgctcccgaatcccggaccgtgagacccgccttc

SEQ ID NO: 51631 - DNA, 408 bp, Mus musculus
  source 1..408: mol_type = other DNA
ttttgttttttacctggcagaccctaaaggaagagaagcaaagcaagcatgccttccctatagagctagcctatgagcaagtggccagggctctcaaatgagcactttttaaagggtccttcacccactgtgctctccacagaggcttcggggggcttccacgttgctgcataatggacacactccgaaattgccagtgggcaggaaatcgcatttcagtaataaaatacagaatggaaaaaaatctagtgttgtttttacacaaagatcttccacagccagggctagcaggatcagggtgggcctggacactgctctgggggcggtgcctgagttcagggaaggggggcactcagccctggaggaatgggcgcggcctagcagggcggaatgggcgtggtcttagaa

SEQ ID NO: 51632 - DNA, 439 bp, Mus musculus
  source 1..439: mol_type = other DNA
ttttgttttttacctggcagaccctaaaggaagagaagcaaagcaagcatgccttccctatagagctagcctatgagcaagtggccagggctctcaaatgagcactttttaaagggtccttcacccactgtgctctccacagaggcttcggggggcttccacgttgctgcataatggacacactccgaaattgccagtgggcaggaaatcgcatttcagtaataaaatacagaatggaaaaaaatctagtgttgtttttacacaaagatcttccacagccagggctagcaggatcagggtgggcctggacactgctctgggggcggtgcctgagttcagggaaggggggcactcagccctggaggaatgggcgcggcctagcagggcggaatgggcgtggtcttagaaggtcccgccccgtagaccatcgcgcccccgc

SEQ ID NO: 51633 - DNA, 339 bp, Mus musculus
  source 1..339: mol_type = other DNA
gatcttggattcaggacccccagctgagggccccctgccctggtttctgctagttcccaggaaacagacagtaactgagttgtttcagcaaaggtgaattaatgttctgtgatgtcagagagggaagccctcaccccacttggacttgggtttagacgctccattttcctgatgagggaacaggcaggcttgctcacatcacccagctactgtgtggctgggttcgaactcaggaagctgagcttctgttcgcaaaaaagcatagcgcctttgcaaaaggtttcaagcacaaaatttaaaatcatttcaaagttcgaaaggattcctagagggatccag

SEQ ID NO: 51634 - DNA, 314 bp, Mus musculus
  source 1..314: mol_type = other DNA
aactttgaaatgattttaaattttgtgcttgaaaccttttgcaaaggcgctatgcttttttgcgaacagaagctcagcttcctgagttcgaacccagccacacagtagctgggtgatgtgagcaagcctgcctgttccctcatcaggaaaatggagcgtctaaacccaagtccaagtggggtgagggcttccctctctgacatcacagaacattaattcacctttgctgaaacaactcagttactgtctgtttcctgggaactagcagaaaccagggcagggggccctcagctgggggtcctgaatccaagatc

SEQ ID NO: 51635 - DNA, 243 bp, Mus musculus
  source 1..243: mol_type = other DNA
accaggcccaaaaaataagttgataaaaatgtattatttgtttccttgcgagtgcaggtaaatgcatgcatgctgtcgcgcactttgggtcccagggctcaaactcgggccctcagcttgaacccagggctacccagccttcttagaggaaggacatacatccttctttcctgcaaggtagtggcccccagcagctgggcacaggactctgacctctagggcaggggagggttcagagtgtga

SEQ ID NO: 51636 - DNA, 136 bp, Mus musculus
  source 1..136: mol_type = other DNA
gaacccagggctacccagccttcttagaggaaggacatacatccttctttcctgcaaggtagtggcccccagcagctgggcacaggactctgacctctagggcaggggagggttcagagtgtgatgcatgaggcag

SEQ ID NO: 51637 - DNA, 562 bp, Mus musculus
  source 1..562: mol_type = other DNA
gaataacttgctttatgtttaaaataagtagctatctgttcataatgatgcacacccatcatctcataccttgagaggcagatgatcaagaattcaaggtcatctctaactacacggtgggtttgaagccgacctggacaatttgaaacctcaacttgcacccgactgctcttccgaaggtccgacattcaatgagatctgactccctcttctgagtgtctgaagacagctacagtgtacttatatataataaaaataaataaatctttaaaaaaaaaagaggcatttaactattaaaaaatcagaaggagtgtataaaaatttgcagcccaggcacccatgaataatcgaggtcccctctgtgcttctccttgagtgacagctaaggatgctcctgggggctctggaacagcctggtaaccacagcaacagttgtttgagatcacaggtgccaaagatcaggcagagtcatttggctcttggctgatgtctcagggatagatgagaagctacaagaggcttctccgtgaagaagaggaaggcatctacatgcaactgagtt

SEQ ID NO: 51638 - DNA, 508 bp, Mus musculus
  source 1..508: mol_type = other DNA
agtggttaagagcactgactgctcttccaagatcagacgccctcttctggtgtgtctgaaaacagctacagtgtattcatatacataaaataaaaaaaaatttaaatagaattcttcagaagaatcctgctatttcttctaatggatacatccgttaagcaaagttttctatacttgagctacaaatccagacactagcctcttttcttgaagcgtggtagtgcacgcctttaatcccaggaggccagcctggtctacagagtgagttccaggacagccagggctagacccagagcattgactgcgcttccgatggtggttcacaaccatctgtatgatgtgtctctagacagtaacagtgtattaaaaaaaaaaaagtaaccacctggggcattcattttcttaagtttctctattcagaacaggctggaccctgccacggggcgagcggatacgtgctgacgtcacgcacgcacacaggcacgcacgcagcgcccaggagactacg

SEQ ID NO: 51639 - DNA, 334 bp, Mus musculus
  source 1..334: mol_type = other DNA
ccaggtcagaaacttttaggattctggattgtacatgtatgtgcatacatacagacagacgtcagagagagtgagacccagcatgaccactcactgtccgccagcctggcccatacagccaaagtaataataataataataaactaggcagatttctgagttcgaggccagcctggtctccagagtaaaccaataaataaataaataaatagatagatagatagatagataaatagataaataaataaataataaatgatgatgacaatgatattaacatcaaaacatatgggaaacagacaggacaagtccttctgagttcctgcctccaggc

SEQ ID NO: 51640 - DNA, 364 bp, Mus musculus
  source 1..364: mol_type = other DNA
tccggtggcgcctcggttcgccccgcccccaggcggcttcctctagggcctcgcggccccgggactacatctcccggcgtccacggaggtagggggcggttcggaagcacccagtcccagtccccgtccggccggtgagtgtggggttgtccccgcgtcgagtcgcccgtccctgggcgcggcactctggttggagctcccccacagagtgttgccttcgccaaccctgcgagtgcaggagaggccggcggcgccaggaacatgcaggcacctgccgagggccctgtcgcggctctaacagatcaggacctgtcattttctggaaagtagcgaacttccgggatccttcaagcctggctggact

SEQ ID NO: 51641 - DNA, 385 bp, Mus musculus
  source 1..385: mol_type = other DNA
tgtaagattggatacaatccgcgctagaaccttttctagcgaggacccaagggggagcctgtcggttggggtcctgccctccgcgttcagaaagactctgaggacatgaagtaacatcacggttacccctcaccactgctctgagcagggtttgaatctctaccccagctctgaggagcaggttctcacgcagcgtgcacagcatgccggagcccgagcgcactctgtcgcgggcctggcgagagaaccaggatcccgtgggtcagcccgaggacctacccggtccggtggcgcctcggttcgccccgcccccaggcggcttcctctagggcctcgcggccccgggactacatctcccggcgtccacggaggtagggggcggttc

SEQ ID NO: 51642 - DNA, 355 bp, Mus musculus
  source 1..355: mol_type = other DNA
cttttcccagattaaaaacaggatgtaagattggatacaatccgcgctagaaccttttctagcgaggacccaagggggagcctgtcggttggggtcctgccctccgcgttcagaaagactctgaggacatgaagtaacatcacggttacccctcaccactgctctgagcagggtttgaatctctaccccagctctgaggagcaggttctcacgcagcgtgcacagcatgccggagcccgagcgcactctgtcgcgggcctggcgagagaaccaggatcccgtgggtcagcccgaggacctacccggtccggtggcgcctcggttcgccccgcccccaggcggcttcctctagggc

SEQ ID NO: 51643 - DNA, 364 bp, Mus musculus
  source 1..364: mol_type = other DNA
agtccagccaggcttgaaggatcccggaagttcgctactttccagaaaatgacaggtcctgatctgttagagccgcgacagggccctcggcaggtgcctgcatgttcctggcgccgccggcctctcctgcactcgcagggttggcgaaggcaacactctgtgggggagctccaaccagagtgccgcgcccagggacgggcgactcgacgcggggacaaccccacactcaccggccggacggggactgggactgggtgcttccgaaccgccccctacctccgtggacgccgggagatgtagtcccggggccgcgaggccctagaggaagccgcctgggggcggggcgaaccgaggcgccaccgga

SEQ ID NO: 51644 - DNA, 358 bp, Mus musculus
  source 1..358: mol_type = other DNA
ccacctctggcccatcccaaaactgacttcatagttaggattctgtggagcctgtcacgatgggacaacagatcctgtcatgatgttaataaaatttcatgagggcatagaatgcttgtttcaaatttgagaattctagattctatcaataacacagaagacagttgttaatgggttctgtaaggtttctctgtatagccctggctgtcctggaaactctgtagaccagactggcctcgatctcagaaatctgccagctcttttcccagattaaaaacaggatgtaagattggatacaatccgcgctagaaccttttctagcgaggacccaagggggagcctgtcggttggggtcctg

SEQ ID NO: 51645 - DNA, 350 bp, Mus musculus
  source 1..350: mol_type = other DNA
tgtagaccaggctggcctcgaactcagaaatccgcctgcctccgagtgctgggattaaaggcgtgcgccacctcgcccggcagcagacccactcttaatactagtgttacacttgcgtaatcacttagatgatctctatgagtccagctggcttatgtagtgaagaatccaccatgccctagcgactggctggtgccttatcagtttacattgcaatggattgtttgcaaagcaaagctgttttccgctttaaaaaaaaaaaaaaggattagctagttcctggcaaacaactgaatccagatcagagtcactgggtcccgatgccatagtcaatctaggcttgggttgag

SEQ ID NO: 51646 - DNA, 474 bp, Mus musculus
  source 1..474: mol_type = other DNA
ttgagacacagtctctcactatgtgtagaccagggcatcaaactcagctaaaactggttctggaacctgcttactgagttaggattccaaggcttaaggcagtcctaagaaagctttcaaatcccagacgtggctcctgttatttacctttctggaccagcattacaagatatctcaatatgtccaagcctttcctgagctatatatatcctgagctatatatatatatatatatatatatatggatctaagctacatatataggggactttaaggcgggcagatctcttttgagttcaaggccagtctggtctgctaattcaatagctaccgaacccgggttcgtgcctgcgctagtgaatcgcgggggcttcggaggagggagtccgcctcacgggttgcggagctccgcccccgctggtccctcccgacccggtacagctgcttccgggctcgcacggctcccggaggccg

SEQ ID NO: 51647 - DNA, 215 bp, Mus musculus
  source 1..215: mol_type = other DNA
tagaccaggctggcctcgaactcagactgtcgctgtcttcagacacaccagaagagggtgtcagatcgaagagcagacagtgctcttctttctttctttttttctacaaagctcttaaaaagcagcagaaatcaaaaccaaaaaatgcaatagaatttttttttatccttaagagttttaggtgttctctggcgcgcgcgagtgtgcgcacgcgt

SEQ ID NO: 51648 - DNA, 341 bp, Mus musculus
  source 1..341: mol_type = other DNA
gaagagcagacagtgctcttctttctttctttttttctacaaagctcttaaaaagcagcagaaatcaaaaccaaaaaatgcaatagaatttttttttatccttaagagttttaggtgttctctggcgcgcgcgagtgtgcgcacgcgtggcgccgctcacgcaggcgcagtgcggtcccccgggcgacgacggcggcggcggcggctcctccgggtggtcggctccctcccatctcggccggcccgggcccgtctcgccccccagaaactcactgttcggtcgtgccccacgaaagtgggggagactgggggagccggaagtaccgcctcgagatcccccc

SEQ ID NO: 51649 - DNA, 293 bp, Mus musculus
  source 1..293: mol_type = other DNA
gagttttaggtgttctctggcgcgcgcgagtgtgcgcacgcgtggcgccgctcacgcaggcgcagtgcggtcccccgggcgacgacggcggcggcggcggctcctccgggtggtcggctccctcccatctcggccggcccgggcccgtctcgccccccagaaactcactgttcggtcgtgccccacgaaagtgggggagactgggggagccggaagtaccgcctcgagatccccccgcggaaggcgggggcggtcagcgagcccgtccagcctcccgtgagtgtccgcggtct

SEQ ID NO: 51650 - DNA, 276 bp, Mus musculus
  source 1..276: mol_type = other DNA
tggtttgtaaaggccagtgagcacccaccaatatacataaaaattcacaggaaaatgttgacctttaaagctgaaactcattgttgaaggaacattaattataaaaacagtttttaaaactattgagcataaaaattaaatgtcaaatatatgttcaaattgtttgcatatattatgcaaataccttggcttgcctatccacgaaattcttccagggtccgacgccaagacgagagtaagggctccgccccctatgcaaataagggggcgtgccca

SEQ ID NO: 51651 - DNA, 347 bp, Mus musculus
  source 1..347: mol_type = other DNA
gagttttaggtgttctctggcgcgcgcgagtgtgcgcacgcgtggcgccgctcacgcaggcgcagtgcggtcccccgggcgacgacggcggcggcggcggctcctccgggtggtcggctccctcccatctcggccggcccgggcccgtctcgccccccagaaactcactgttcggtcgtgccccacgaaagtgggggagactgggggagccggaagtaccgcctcgagatccccccgcggaaggcgggggcggtcagcgagcccgtccagcctcccgtgagtgtccgcggtctttcccgatctctcgggcgcttgctcggtcgcgaccggtgatgacactggcctct

SEQ ID NO: 51652 - DNA, 348 bp, Mus musculus
  source 1..348: mol_type = other DNA
ctcccctggtgacccagtgactgaggggaccaaggcggacaggaagtagctctgtctactgtgtctcttcaaactctcaaatgactttgtagattcagcctaagatccaagtccttctgggacatgtctccatgtgtccccagtgctcctctgtagcccctgagagggaaagtcagccagctgcctgtcttaacctgcatcatgaagcctgaggagatttcaagtaccctcccaagccccacctcaggatctggggaaagccactgggcctagggtatcacgctcggtccctcagatccacagggctgtagctccagccatctgggaggttgctggtgtcagcagaag

SEQ ID NO: 51653 - DNA, 419 bp, Mus musculus
  source 1..419: mol_type = other DNA
tcagtaactccttgaattaaaaaattagttcgagcactgactctccccataatgagatttgatgccctcttctggtgcatctaaagacagctacagtgtacaataataaataaatctttttaaaaaaattagttcttagggttaaataaatagctcagccaaatatggcagctcgcattctctctttttatatttattaaaagtgtcactgacttcaaatcacagcagttggaaggctgaagtcagttgcccaggcatctgtttcaacaagaaagagcactgactgttggtggctcacaaccatctatgagatctgacaccctcctacagtgtacttatatataataataaataaatctttttaaaaaagaaaaagagtacaggtacctctgggccactgtgacctcacagaaaggtag

SEQ ID NO: 51654 - DNA, 384 bp, Mus musculus
  source 1..384: mol_type = other DNA
caggaaggggacatggcctgaaacctttcattgaagtcaacaaatttctcattcattcattcattcattcatacatccaatggaggaggctcattctagacagactcccttaaggtggagtgtgcctctgtattgctttatcaggacagagagagagagagagactttcccatctggttttagagactgaaacacgcagacacctcaccccccctcccgtgtgtgtgtgtgtgtgtgtgtgtgtgtgtgtgtgcgcgcgcgcgtgcgtgcgtgcatgcatgtgtgcaggtgcgtgtgtcccttcagcactgtaaggtccagccaaccccggccccagcgctgggtaaacagggtgggggggtctacccctgaggtatgaaagcc

SEQ ID NO: 51655 - DNA, 264 bp, Mus musculus
  source 1..264: mol_type = other DNA
cctgggaaagggcacccttctctcttttcccacccccatcagcctggggcagagtaaatgggaggtctctgtatagccctggctgtcctgtagaccaggctggccttgaggggcgtgcgcgtgtagctctggctgtgcttgaactcacagagatccatctctatgagaccagcctggtctacagagtgagttccaggacagccagggctacacagagaaactctgttaaaggggccccttgcctcagagatggggaacttgggg

SEQ ID NO: 51656 - DNA, 440 bp, Mus musculus
  source 1..440: mol_type = other DNA
tgtgtgtgtgtgtgcgcgcgcgcgtgcgtgcgtgcatgcatgtgtgcaggtgcgtgtgtcccttcagcactgtaaggtccagccaaccccggccccagcgctgggtaaacagggtgggggggtctacccctgaggtatgaaagcccctgccccggtcctagttctgagtctggatggggacacgggcagggcctgggtgggagaccccaggggaggggctgcctcttgctggctgtggcaggagctacttccccagtgccttcactgtcctgctgtgctggccttggtgccgcaggatcagggctgccgcgctcagctggccgctctccccagagggaatgtctggtctgtctttgcctctccaggcaatcctagcctgaaacagcaggcccaggccttggggctgggctctagttgccattagccaaatctgacctctg

SEQ ID NO: 51657 - DNA, 122 bp, Mus musculus
  source 1..122: mol_type = other DNA
aatgtctgctgagctcatgcccagggggatgtcccatttagaaatcaaaaggaaatagacacaggcatggtctttctacaaagaaacagacaatgattagctatgggtttcgttataaaggc

SEQ ID NO: 51658 - DNA, 79 bp, Mus musculus
  source 1..79: mol_type = other DNA
ctgggagccctgggggcttccccaagccccagccccggacccgagcgccagcgcccaggaccccgcacagcaggtgagc

SEQ ID NO: 51659 - DNA, 213 bp, Mus musculus
  source 1..213: mol_type = other DNA
taatttcgctgctattatgaatcataatgtaaatatttgttttaaatagaggtttgaactggatttctgagttctaggccagcctggtctacagagtgagtttcaggacagccagggctacacagagaaaccctatatattggaatgaaggggcggcaggcatgtcaagcatccagactgggagccctgggggcttccccaagccccagcccc

SEQ ID NO: 51660 - DNA, 190 bp, Mus musculus
  source 1..190: mol_type = other DNA
accgggtgggtgtctgtcatcctcacactgaccgcccgagggcagcagagaccagccctgtgctgactactgcagcaggtgcagggcctctccgtgtcaccagggtccacaggagacagggattctctctctgcagcgttccgggatggaacacacagttcatttccgcccgaaacttgcgcgtgtgctt

SEQ ID NO: 51661 - DNA, 288 bp, Mus musculus
  source 1..288: mol_type = other DNA
cgtagaggcttcttcctctggggcctggggggaggggttactcatcagacctgctccccgcccccccaaggaccctcagagacggaggccggaggcctgggctaagcacacgcgcaagtttcgggcggaaatgaactgtgtgttccatcccggaacgctgcagagagagaatccctgtctcctgtggaccctggtgacacggagaggccctgcacctgctgcagtagtcagcacagggctggtctctgctgccctcgggcggtcagtgtgaggatgacagacacccac

SEQ ID NO: 51662 - DNA, 322 bp, Mus musculus
  source 1..322: mol_type = other DNA
aggaattcccacccgcctgctgcttaggcaacactgatacttagtgttactttgtattaatattaagtgtccttaatagggaaattctggggcgtggtcacgtgtccccctcccctccagcagaggcccgagttaggtcgggtcacccccggaaacgcttctcattcgatcgcggagtcctccatgcccacagatcgtctgaagcttcatttcaagtgggcgttctgcaaagccagccgcggagcgcgcgcggcgaaagcctgcttccggctccttgcgcgtgcgccctggcggccgggaaggcgggaggccggggcgagcc

SEQ ID NO: 51663 - DNA, 380 bp, Mus musculus
  source 1..380: mol_type = other DNA
gtcctctgcccacccggggccgcggcggccggaggcggcgccaggaggagggcggggcccctcgcatctcccctccgggccgcccagggatgggaagatctcgctccggggcccgtccagcacttctggggaagcttttccgagagcactgcaaggcgacttttaaaattaacccatctttttcaaaacaaaaaaattttttttttcttgaaatggaggtccaggtgtgcgccgctgggacggccactcggagtgagcgctctgcgcagtgctgacccttatctatcacccttgactgatggctgacgttggggatcaccgaggtggcaggagaaagcgcagtctctgtcttcccaagtgacgagtccattcgtgactga

SEQ ID NO: 51664 - DNA, 143 bp, Mus musculus
  source 1..143: mol_type = other DNA
aatgagctcttggacggaccgaggagagctgctccgggccatcgttgacttctccgttaaacagagggaagtgtcgtttccggaaaccttaacgatcaggatgctggcggttacatgacccaaggcacggtgcaaaaatgtct

SEQ ID NO: 51665 - DNA, 374 bp, Mus musculus
  source 1..374: mol_type = other DNA
atgcattaaggacagggggtgcgtgggacaccccacactaaataaaatttatgttcctcttcccagtggacaacggggtctacagtgatctcaggacggagctacagaggcttcatatgggaagaaacaggaggagtctgagactaagcccgaggctgcaaagtctcccctttacagatgagagtcctgcacagagcttgcaggccagcgcctctgctttaaagagaagcctctctccactgctagaagacagcttctgggtcagaactcggagtctgctctctgtccgcagtacaggggtggggaagcccagggctggggattccccatctcctcaacctgggtcaggtccatcagcgtcgccgcggacgctg

SEQ ID NO: 51666 - DNA, 439 bp, Mus musculus
  source 1..439: mol_type = other DNA
actgctaacctggataattatgcaagttaaatcagggttctcattaaaggagagattcttgtgaacttagatggactctgagagacagggtcttctgcaatccacacacaccctgtgagctcactgtgttccagtgagtgctgcactggggtccacagctcactccagggatcctgtgctccagagtcaggggctgggagtcatctcggactgacagttaacgttggtcagcaagatgaccacagtggttgagtctcatgatatgaactcaaacagatattaaattacttattttccatattgaacatcacataaggatggtcacgcttctttgtcccaaaagaaaatgtgcatgcaatgacagtgtagtgtcaaatagacacatagttcactctcatcattgatttaactgagtctttgtggaatttcttaaatcttc

SEQ ID NO: 51667 - DNA, 301 bp, Mus musculus
  source 1..301: mol_type = other DNA
tatcaatattaggaatggagttggaccccactgtgctcccattccatccacagggcaggtccctggctcagctcagagggaggaactcacacatcctcctccctcagctctcactgaattgagaaaagcttttgggaaagtctataaggcatttttaaaattattattaatgatcagtatggagccgccatgagctacaaagctattagcttgccctggagcagcaccactggggatctgatgccctctctgacctcctgaggtagcttgggtggcaggatcctggggaaccaaccagctt

SEQ ID NO: 51668 - DNA, 355 bp, Mus musculus
  source 1..355: mol_type = other DNA
tcccatcactgatgttgtgtgatcaggctaccacacagttctggggaagggaaagctcctgaagcaacccttcggcaggaatggagttggaacccactgtgttcccattcctccctggctcagctcagggagaggaactcacatatcctcctccctcagctctcactgagtgttgagaaagcaatttaaaaattattattaatgatcagtatccatgagctacaaagctattagcactggtcttcaatgaaagtgtaaactgaaagaaaccctttctttttcaagctggggatctgatccctgcaggatcctgggaaaccaaccagctcctcagcagcgggcgcaggttataaag

SEQ ID NO: 51669 - DNA, 493 bp, Mus musculus
  source 1..493: mol_type = other DNA
catagcttctaccgtactatcatcattattctgtgacagttcctctcctactgttattgagtcactaaagcaactgcaccagacagggatcagtgccctgctgtctgtggtctgcacaggggtctctcttcagtggacaagggggtctcctgtgctgagacaatgtcccagaaggaagatctttgtttttaaaaaaacaaaaaagaaacattcatctaggaagtgacacaaggaatctgtgtcccagcacagggctgtatcctctttatagaagagagtcgtgtgagccgcccactgcaggtgaacagagcctggtaggccagcgcctctgctttaaggagaagcctctctccacttgacttctgaagagcagagagtctggcctgcaggtctcttctctcctggtgtcctgacagcttctgggtcagaactcggagacaggggtggggatttcccatctcccacccccattgggtgacgtgatcaccgggaa

SEQ ID NO: 51670 - DNA, 450 bp, Mus musculus
  source 1..450: mol_type = other DNA
gggtggggatttcccatctcccacccccattgggtgacgtgatcaccgggaagtcgcccagaccctgatcgagatccgcgcgggtgagtacgggagggggcggcacgggggaagccgcgtcccggcgtcgcccacctgaccctgctcccctcccggcccgctcacccgccgggggtcccggaaggagttcggggtctcaccgcgccctgcccgtgtcccggccgggccttgggacacggagttcagattttccgagtgaacctgaggaccctgctcagctactacaaccagagcgcgggcggtgagtgaccccggatcggaggtcacgacccctccacgtcccaaaacaggggcccgagacgtcccgggccccaagttcgaggttctgagcagaacggacgcgggcggggcgtgtgggcggggctgaccgcggggtcccgcaggctctca

SEQ ID NO: 51671 - DNA, 454 bp, Mus musculus
  source 1..454: mol_type = other DNA
aggggtctctcttcagtggacaaggggtctcctgtgctgagtggaagatctttgttttaaaaaacaaaaacaaacgaggccagcctggagtacaaagtgagttccaggacagccagtgctatagcgaagtctacacttaactgatgatgaacagagcctggtctctgtggagtccatgtggggctttgcagaccagcgcctctgctttaaggagaagcctatcttcaatttcttctagaagactccaaggtctgacttctgaagagtcagaactcggagacacagctctctgtccccggcacagggttcaggcaaagtcttaatctccaggctgggtggggaagcccatggctggggattccccatctccctgccaggacactgatgacctgtaacagttctcacccctattgggtgaggtgattaccctcagcgtcggcgcgggagcgggttg

SEQ ID NO: 51672 - DNA, 320 bp, Mus musculus
  source 1..320: mol_type = other DNA
cctgatttctaatttagatacgaactcaaacacatatgaaatttcttatttttagctacctatctcgtgctattgagacatgttgacccactggctcatgtggattagtcccctcaggaaaatgtgcagtcctgtgctgagggggccagctctgcctgcagagcacatagttcattgtaattactgatttaatgcatttatttatttatttatttatttatttatttaatgcatggaagaaagatttatttattatttattatacataaatacactgtagctgacttcagatgcaccagaagcctgcttccagggcagct

SEQ ID NO: 51673 - DNA, 463 bp, Mus musculus
  source 1..463: mol_type = other DNA
caggggtctctcttcagtggacaaggggatctcctgtgctgagtcccaggtggaagatctttgttttaaaaaacaaaaacaaaaccgaggccagcctggagtacaaagtgagttccaggacagccagtgctatacagaaagaggcgaagtctacacttaactgatgaaacagagcctggtctctatggagtccatgtggggctttgcagaccagcgcctctgctttaaggagaagcctatcttcaatttcttctagaagactccaaggtctgacttctgaagagtcagaactcggagacacagctctctgtccccggcacagggttcaggcaaagtcttaatctccaggctgggtggggaagcccatggctggggattccccatctccctgccaggacactgatgacctgtaacagttctcacccctattgggtgaggtgatcaccgggggagcgggttgtaa

SEQ ID NO: 51674 - DNA, 379 bp, Mus musculus
  source 1..379: mol_type = other DNA
acaggggtctctcttcagtggacaaggggatctcctgtgctgagtcccaggtggaagatctttgttttaaaaaacaaaaacaaaaccgaggccagcctggagtacaaagtgagttccaggacagccagtgctatacagaaaacagagcctggtctctgtggagtccatgtggggctttgcagaccagcgcctctgctttaaggagaagcctatcttcagtgtggccttctctcctggtgtcctgacaagctctctgtccccggcacagggttcaggcaaagttctagggtagggaagcccatggctggggattcccatctcccttctcacccctattgggtgaggtgattaccctcagcgtcggcgcgggagcgggttg

SEQ ID NO: 51675 - DNA, 319 bp, Mus musculus
  source 1..319: mol_type = other DNA
ccacactatctcctatggtgaattagtcactaaagcaacttgctgtctccacgggagcctcttcccagtggacaaggggaggcaaaggctcctctttaaagatgagagtcctgcactcaggcttgacagtgtgactagcgcctctgctttaaggagaagcctctgaagtagattttcttctagaagattctctggctcccggtgtcctgacagtccacgcggtgaggtcaggggttgggaagcccagggctgaggactccccatctccctgggatgagtggcgcgttcctggggaaccaaccagcgtcgccgcgccact

SEQ ID NO: 51676 - DNA, 284 bp, Mus musculus
  source 1..284: mol_type = other DNA
tgtccccaggggagccatcctggccctggggaccaggattgtccagccaaggcaggtggttagtgtctaatctaccaacctggacaacactgtgctctgaaaacgcagagcctcccatggtagagcctctaaactctggaggacttgtcctggccttggacatgggctggttcacccatatctaggactctagactccggtgaccctgtccagacgtccccaacctccgtctggaagacacaggtctgctcctccacccacccagggggcggggccagaggtca

SEQ ID NO: 51677 - DNA, 480 bp, Mus musculus
  source 1..480: mol_type = other DNA
cccagatcacgcatgcgcggggcggcgggctgctctacagctccatttctccctaccggaaataggaagaagaaaggtgcaagcaggcaccctgacgccccaaactttacggcccctcctctccccgggaacccgggaaaacgggagagcgggagatgagcaactcccccctgcgcatcggccaatagagcaaatgggtgcaactcagatggccagccggcgggggggcgggctcgcgggcgcgaagtcggacccgggaattccgaaggaggagtctgcgcagcgcgcgcgcgcgccttcacccaagccccgccttcggggcggcttccttggctgagcgcgggacgcagggtacggaatcccttcctcagtttaccccgcgagcgaaaaaaagaaaggtggattcacttcccttaggggaactgatccagaaagtttaaccataaattccctgactccaccgtgtcacacgcacgtttg

SEQ ID NO: 51678 - DNA, 383 bp, Mus musculus
  source 1..383: mol_type = other DNA
tcttccctaggatccctgaggaatcggagcagccgggagcccgttgctgggaagccagcttcctggcaactcatccccagatcacgcatgcgcggggcggcgggctgctctacagctccatttctccctaccggaaataggaagaagaaaggtgcaagcaggcaccctgacgccccaaactttacggcccctcctctccccgggaacccgggaaaacgggagagcgggagatgagcaactcccccctgcgcatcggccaatagagcaaatgggtgcaactcagatggccagccggcgggggggcgggctcgcgggcgcgaagtcggacccgggaattccgaaggaggagtctgcgcagcgcgcgcgcgcgccttcacccaagc

SEQ ID NO: 51679 - DNA, 537 bp, Mus musculus
  source 1..537: mol_type = other DNA
cttgtggcacctcagtgaagccggatcctcaggcggctcaacatccgggagcctccgcaaacgtgcgtgtgacacggtggagtcagggaatttatggttaaactttctggatcagttcccctaagggaagtgaatccacctttctttttttcgctcgcggggtaaactgaggaagggattccgtaccctgcgtcccgcgctcagccaaggaagccgccccgaaggcggggcttgggtgaaggcgcgcgcgcgcgctgcgcagactcctccttcggaattcccgggtccgacttcgcgcccgcgagcccgcccccccgccggctggccatctgagttgcacccatttgctctattggccgatgcgcaggggggagttgctcatctcccgctctcccgttttcccgggttcccggggagaggaggggccgtaaagtttggggcgtcagggtgcctgcttgcacctttcttcttcctatttccggtagggagaaatggagctgtagagcagcccgccgccccgcgcatgcgtgatctggg

SEQ ID NO: 51680 - DNA, 368 bp, Mus musculus
  source 1..368: mol_type = other DNA
tccaggatcaagatggatgctctggggccagggctatcaagtggaaaccaagtttccctggattggagctgtagtccagcttaaggaccctgatgctcagggccatcctcaggaaccaggatatcctggcttcccgcgtcacccaggtggctccccctggaattccttagatgtcactgcctgggaagttcccagtgactggctccgaggctgagatgccagtctagagggtgctttctgacccaggcaaaggtagccttccttgtgattataaacctggggtctgggtcactgatagacccggctgcccccggcccccgggactgggggacagaatccttagggtgctgagctggcccctccccaca

SEQ ID NO: 51681 - DNA, 297 bp, Mus musculus
  source 1..297: mol_type = other DNA
tgcccagctaggctgaggaggagcaggctaatgagcagcctggccaccaccttcccaattgtgagtcaccgaggctcagctatgacaggggtcccaacccagacctcccggggccagcgtgctgtccactcttcggtccctgggcgagagtggccagcttccaggaggtggcccgggggcagagcacctggtaggggctagtgcccagtggctccaggtcccctgcaccgcagtcacctcttctgctgagtaggcagatgtgacaccggattagaatgtccagcccggcataaaggt

SEQ ID NO: 51682 - DNA, 232 bp, Mus musculus
  source 1..232: mol_type = other DNA
aaaggtataccgccactgtgggcagcactatccctatgtatgagagagaaaacacagcctttctgtttctgtttaagtgtaagcctaccagcttacaatcaatcaatcaatcaatcaatcaatcaatcaatctttctcttgcttttggtcagactgttttgtcacagcaagtgaatttcttgggaaagtttctgaccccatccctgcctcaggggcggatcttggcagtctg

SEQ ID NO: 51683 - DNA, 431 bp, Mus musculus
  source 1..431: mol_type = other DNA
ctcaaggaatgactaatagccatccatactttatgtaaaaaatttttgtcgctgcttcaaggagtagttgttgctccagaaaagattcaagggcaaattctttttttcaatatttggaacataagttacagattcaagtaagaaaaaataatttagttactctaaatgattttcgaaggttgttaagattaaccctcaagggggatgcaagtccggctattagtcaatgacagatacattatataggctatgatcaattgatacattatatagactatgatcatttgatacattatatagactatgatcaattgttggctgtttgcatgccaacaattgatcatagtctatataatggtagagcattatagagcacccgggtgctctataatggaacacccagttcctcaggaactttcaaggattcattg

SEQ ID NO: 51684 - DNA, 363 bp, Mus musculus
  source 1..363: mol_type = other DNA
ctcattgttacttacatataataaataaacaaatctttaaaaaaaagaactttaatcccagcatacaaaacaataagaattattattgagctcaaagtgtttagagctcttgttgatcttccaaaggcactaaccatttgcagatctggtttctgtgaacactgaacacatgtcgtgctcatgccactgaggctgggggacggtagaaggagctgggcctcatccaccccccctgtcaggaatgatcacagctaagaacagttcttaggtggggcccagatacctgcaggaggcccccgccttagtgagtggccctctccagggggaaactagaaaatccagttgccatgttctcttggtgcc

SEQ ID NO: 51685 - DNA, 463 bp, Mus musculus
  source 1..463: mol_type = other DNA
ctatagaaacttcacattctataggagctccacattctataggaggctcacattctataggaactccatattctacaggagctccatattctatgggggtcttccacattctataggggtccatagtctatagaaggtctatattctgtaggggtccacattttaaaggattccacattctataagaggatccacattctataggaggtgcacatcctataggagtccacattctatagaagtagtgcattctgatggcggtgagggctgcccggaccggtccagcgctctgtccgcatggacagtggctcagaacctgcaggcagtactagcccttgtaggggctggatcaggaggctggccaggtactccacccagatcggtggaacccaggtacctagctccatgacatagctgcggcgcccccctgtgacgtcaaatctgaccccttataagatgaagg

SEQ ID NO: 51686 - DNA, 537 bp, Mus musculus
  source 1..537: mol_type = other DNA
ggctggcagcctgggcacctagccgcgagaggatggatgagaagccaggtcctatagcctcaaacagaccagattcggctgtgggagctggaacggttcactgaaggtgagtggcttccgctgacctaatctcaatcataaggccagcaatttcacgcaaaagttttgtgcatttctattttggtataaatatgtcgcctgcagcccctgcctgcatgctgcttggaggggcagagaccactgcagcaccagttcctgtcgcaagtggactttgaactgctgctggcccacgcgcgggagctgggcgtgcttgtgttcgagaactcggccaatgacgccggcagggcacagcgacgtcaagcgcttctggaagcggcagaagcacagctcctgagccggccaggtccagccccgggcgggcagctttacacaccgggatatttcttgtttaataaaattatggaaaaaaatctaccgtctgccggcgtccggaggagcgagagtcttttacgcatgcgcctgcgtgtccccgcccac

SEQ ID NO: 51687 - DNA, 369 bp, Mus musculus
  source 1..369: mol_type = other DNA
ttgtcttgcctaggataaattcataaatcaaatcagggcaaatgatagctttctcttaaaaattgcaatgtaatcttctaactccccagggagttggtgtaattccagttccagggaatctgacttcacattgtgatccacgtcatgtgaagatgttctgcactgatcattatctcagtttcgtgaggaacaacagaggtcaagaaacccagtttgtcgccgggcagcactcaggcaggcggagttctgagttcgaggctagcctggtctacagaataggaggccccggagctcctccagacttcggatgtttctagggaatcccaatgaaaagccacctagagcctgactcatagtctccaatgtagg

SEQ ID NO: 51688 - DNA, 429 bp, Mus musculus
  source 1..429: mol_type = other DNA
gcagactctgcggcttccaccagatccgctcagggatctgtgaccggctctcagaacctagagggtctggctagacaggtgagcccggctcccttcccccagccgggctgcagctctcgctccggtgctgggcctgtgggaaccctctctccctctctccaggaaccgagcccagaaaaaggggaggagggacggcgccaactctccccacccccgagccaccgcgcggggtccctagggggcttagcgggcccctgatggtgctgctgtaccccagcatcggggtggcgggggctacgcgggcgggtaccgcacgagcgaggggcggcgccgggcgtgggagcgcgggcgccggggcgggagtaccggcgggggacgggcgcggggaggcggcgcctgggcgcgatccggccccgcgctggctcctct

SEQ ID NO: 51689 - DNA, 287 bp, Mus musculus
  source 1..287: mol_type = other DNA
ctcccctagaggcagctgcatctcgaggcaggggggtgggcccatctctgttcttggctcagctatgtaggccccagggcccctgggaatctgggctccgagtagcacattccagccggtgggccccagccctgcgtccctcctactcctccggccctggtctgattctacctcccatgggcccttcactgggcagtgtgagtcacgggcgcccgggcttccccagagcggccctcctgggaggaggggctgccgccagcgcaggtgaggttactgggaaaccttgg

SEQ ID NO: 51690 - DNA, 339 bp, Mus musculus
  source 1..339: mol_type = other DNA
taaaagagcacagtcctcccaaacctctcagagctctatagagggcggagcctggcttcagctgcctccaacccccatcctttgaaagctttggggttcgaggttttcagaccacagactggagagtgtcctttaaagacgctttatactgtagagatagccagtttaaaaactggattcttccagcagccagcgaacgctgctttcgacgtcccctccctctctgcgggggctgagaggctcagcgaggggagcagagctgggttgccatggtcaccttgaagccagccgcagctggccagggcagctgctcttgggcccccgaggctggagcttgga

SEQ ID NO: 51691 - DNA, 253 bp, Mus musculus
  source 1..253: mol_type = other DNA
ctgacctctggaagaacagccagtgctcgaagaggacaaagctgggactagccattttccatctctgagaaatcagtctcctcccaccccgctgaggagggagtccagctactacacggagactgccttctgtgactacagattctgtttgtaggggaagcgctgtaaaagagcacagtcctcccaaacctctcagagctctatagagggcggagcctggcttcagctgcctccaacccccatcctttgaaag

SEQ ID NO: 51692 - DNA, 174 bp, Mus musculus
  source 1..174: mol_type = other DNA
caggtcctgcctccgcttggcaggctgggaagatcccagtctcataattttagaaacttcacttattttgtgacccacctagtatggggcaaaggcaggagcttcggacttcctgcatacctccaagtaagtacgtgaatcagctgcgaagggcggagttccccccggcccggc

SEQ ID NO: 51693 - DNA, 280 bp, Mus musculus
  source 1..280: mol_type = other DNA
accgcgggtcctggctaggcccactggggacggacagagactttctccgtgtctaattaatatttatgtatttatgtatatcctcctaggtgtatgcagggcgagatatgcctccctgctgtaacacagatccgggtggtaggactcccagcttaaggcttaacacgaataaacttactaggtgcccagtccgacctatatccggtcaccggatgcttactcaggggcggagcttccacgccaatggtctggcatccccctgggctgccgagaacccgag

SEQ ID NO: 51694 - DNA, 308 bp, Mus musculus
  source 1..308: mol_type = other DNA
tgaatgaagcttgctctcttatagaacgggccctcactaattgagaaaatgccgatctcatggaggcatttccccaagataactccagtctgtgtcaagttgaccccttggaaacagaagggtaattctttctggcagctggcagggcgtgtccaacacacaaatcctctctcagaatagaaaataggaatctcgtgtgaggacatttttcatgaaaaaataaaataaccaatggccgcctggcaggggcgcccgcctatctcccgcccccggccgcgcgaacgcgagccccgccctgcgcgccttcc

SEQ ID NO: 51695 - DNA, 562 bp, Mus musculus
  source 1..562: mol_type = other DNA
acatttaagttacatcaatactcctttattcattaaaaatatttcaattttggttatgccaacaatgaaagcgattattggaacacggataagtcatccaacttaaagcttcaaacgtctggcgatttattatggactggaataccttcatgttttattataatgaaataaattattttattatacttttctcctcttttgaaagacgacgacagactttgaggttttagcaaaacagcttgctgtatttacccagcactcgggaagtggcaggcggatttctgagttcgaggccagcctggtctacaaagtgagttccaggacagccagggctatacagagaaaccaaaaaaaaaaaaaaaagtccgtcattttatacattaatacgtacatacatagatgtggaagaaaatccctctgcaatagggaatctgcagcctccagccacgactgctgcctgcaaccggcgccatttagtagagcccttctagccgccgccggtaactggcgccagaacgtagcgacggagggttggcctagggcactacccaatcacggtgcg

SEQ ID NO: 51696 - DNA, 491 bp, Mus musculus
  source 1..491: mol_type = other DNA
tggaataccttcatgttttattataatgaaataaattattttattatacttttctcctcttttgaaagacgacgacagactttgaggttttagcaaaacagcttgctgtatttacccagcactcgggaagtggcaggcggatttctgagttcgaggccagcctggtctacaaagtgagttccaggacagccagggctatacagagaaaccaaaaaaaaaaaaaaaagtccgtcattttatacattaatacgtacatacatagatgtggaagaaaatccctctgcaatagggaatctgcagcctccagccacgactgctgcctgcaaccggcgccatttagtagagcccttctagccgccgccggtaactggcgccagaacgtagcgacggagggttggcctagggcactacccaatcacggtgcgcttgaatcaatcggcgcgcctcttccgggattcgcactcccgccacctggtagcggccgttactgg

SEQ ID NO: 51697 - DNA, 256 bp, Mus musculus
  source 1..256: mol_type = other DNA
gctctagagatgactatataggccaggctggcctggaacttggagatactggaattacaggtaaggagtgattatctttaaaaacaagatgttctttatgtttcgctctgtcttcactttcctcgagaacactgacagcgctgagtagccgcagaccagctgccctgacgacgcctgggatgcgtacgcgccgctcgcggtccccgccttgccgccagcacccccaaggaggcgggacctgggcagggccagcagt

SEQ ID NO: 51698 - DNA, 361 bp, Mus musculus
  source 1..361: mol_type = other DNA
cctaaggcgacgtctcccgattttaactcgggcagaaaaaataaaattttatacatatgatatccacttggtgatagccgagcactctaaaacgatcgcaaggctggggccacaccccatggctctctgggagccagggcctggcagccgccttctctgccacgggcgggtccgactccaagcagctgccgcttcctccccatgtccctcagggggcctgagtcacgggccgccgccccgggtcggccagctggagaagtgggtctggacaccccgcttcttcggggctgcaaggaaggacgcgggaaggagggcagcgaagccccgcccttcgccgggctcctccctagacaaagcggtc

SEQ ID NO: 51699 - DNA, 320 bp, Mus musculus
  source 1..320: mol_type = other DNA
cttctctgccaggcgggtccgactccaagcagctgccgcttcctccccatgtccctcagggggcctgagtcacgggccgccgccccgggtcggccagctggagaagtgggtctggacaccccgcttcttcggggctgcaaggaaggacgcgggaaggagggcagcgaagccccgcccttcgccgggctcctccctagacaaagcggtcgccgcccccgcctggcccccagtctgtcgcgcccgagttctggagagggtatttcccctgacccgcctcgggggcgggaaagaggcggggccgagcgcagccgggaaggcag

SEQ ID NO: 51700 - DNA, 160 bp, Mus musculus
  source 1..160: mol_type = other DNA
tcgcgcccgagttctggagagggtatttcccctgacccgcctcgggggcgggaaagaggcggggccgagcgcagccgggaaggcagccgggagctgcgggggccccgtgcgaagaggcgccggcgcccttgcctcccctgcgtaccgggggaggcagtct

SEQ ID NO: 51701 - DNA, 413 bp, Mus musculus
  source 1..413: mol_type = other DNA
agcacttgctgctctcatgtttggttcccagcacctatagagagacacaatatctctgaccgcacattaaataaataaatattaaaatcttatgatgtatttgttttaatttttaatattttaagcagcactccgagttcgaggccagcctggtcactctcgaaaaaccaaaaaaaaaaaatttatttttaaaaaaattaggtgtatgtgtgtttgtgtatgagcacgtgcacacaagtgcaggtgtcagaatcctcctggatctgcaccgaatcgaactcgacttcgctgagccagctgtgggaactagttagtcatcactgacagcttgtcgaggctgtgcatgaaagcctcttgcacttacccgcccagccaccgtcgatccctggccggaagagcgcgactctttccgg

SEQ ID NO: 51702 - DNA, 383 bp, Mus musculus
  source 1..383: mol_type = other DNA
ggggctaccatggattccaggccagccagggctacctccaccccagctgggctgatcagaagcttcaagtcctacctgtactccatgggagaaatgatgcgatctatatataacatgtatcaggactgggcactctgcctgcacctcagtttccagtaaatagatgaatgtataaacttcgtcacccataaagtagtacataaacggaagctattatcattatatattacatatatattctatattatcattttctattaaatattccaagtcccttggcgcccaggaaccccaggggcagggggtccatggggcctggccgagccctctgggagccttccccgtcgccgggggcgtggccgtgctcccgccgtcccccggag

SEQ ID NO: 51703 - DNA, 448 bp, Mus musculus
  source 1..448: mol_type = other DNA
gataggtgaggtctacacctcccccttgaactggataccagtttctctgagtacttaagtttggacaccgtgctgcccaccaggtcggccagtgaggagcctacacagacaggtgctccaagggcccaggcgccacccccccagtcctggacggtgggtggggaaccaggccttggtaaccatggccaaagcttagtcctcagtatggatgcattcattcactcattcattcaacctttgtatcgttatttttaaccagagcaataaaagtatttatttgttatcactatagctaccgacaaaaagtgacttgtcattattcaaattctaggcctgacaagaggctgcgcaggcgccctgggagcgccccggcccgctgtgcgcaagcgcactcccgcgtagcggcgcctgggctgctgcgggcccgctgtgcgcaggcgcacggtct

SEQ ID NO: 51704 - DNA, 629 bp, Mus musculus
  source 1..629: mol_type = other DNA
tctgagtacttaagtttggacaccgtgctgcccaccaggtcggccagtgaggagcctacacagacaggtgctccaagggcccaggcgccacccccccagtcctggacggtgggtggggaaccaggccttggtaaccatggccaaagcttagtcctcagtatggatgcattcattcactcattcattcaacctttgtatcgttatttttaaccagagcaataaaagtatttatttgttatcactatagctaccgacaaaaagtgacttgtcattattcaaattctaggcctgacaagaggctgcgcaggcgccctgggagcgccccggcccgctgtgcgcaagcgcactcccgcgtagcggcgcctgggctgctgcgggcccgctgtgcgcaggcgcacggtctccttcacgaagccggctccggggcgcgctgcccggcgaggagacggagacgggacgcgggaggcgcccgttcactcccggaacaccatgtaccgtccgagcccgggggccgcccggcgcctcgggccctgcctccgcgcctaccaggcgcgaccccaggtgaggaggggcgggcggagaccctcctcagagccggccgaggggcggggcgccgggccgcgcaggcg

SEQ ID NO: 51705 - DNA, 202 bp, Mus musculus
  source 1..202: mol_type = other DNA
acatggttacatataaactggagactgatacttggttgccctggcatctcaggggcaccgagccctgcgctgttcccggagcggatcaccgtgctggaccagcacctgcggcctccggcccgccgacccggaaccacaacgccggcctggatctagccgggttaatagaccggcctaatgtggcctcaacaagaggctatag

SEQ ID NO: 51706 - DNA, 142 bp, Mus musculus
  source 1..142: mol_type = other DNA
tgactccaccagccctggtcaggtgaaccttggtacccatggtacagcagagagagagctgtctcgccagtgcttaacatggttacatataaactggagactgatacttggttgccctggcatctcaggggcaccgagccct

SEQ ID NO: 51707 - DNA, 366 bp, Mus musculus
  source 1..366: mol_type = other DNA
tcaggatcctttcaagggtctttctccgagaaaacgcctttaaacgtttcaaagttagggaaaaacgtggctgccccccagaatggcggccgcccgctcgggcggagtcttttatacccggccattgtgcgcgaggcgaactctgattggccagcgtgcgagccgggtcgcccgcggattggacgtcctccggcgacccggggtcgccctcggttggccgaaacggcccgacggctttcatgttagacactaaccatggaatctaggattcatcgtgactcgcagtttaaattcgcgattgcggggcgtgtccttggcccaccctagtgcgtgtcccgagcatgcgcagtcgctcttccggcaggc

SEQ ID NO: 51708 - DNA, 392 bp, Mus musculus
  source 1..392: mol_type = other DNA
ttgcctaatggtagtcgggagacgacgatgacacgctcggtccacgttttacctgagctacataggaacttcgtaagagtgaagcgtgtgccgcaagggggcagccatcttgacgcacaccggacgtacggcctgccggaagagcgactgcgcatgctcgggacacgcactagggtgggccaaggacacgccccgcaatcgcgaatttaaactgcgagtcacgatgaatcctagattccatggttagtgtctaacatgaaagccgtcgggccgtttcggccaaccgagggcgaccccgggtcgccggaggacgtccaatccgcgggcgacccggctcgcacgctggccaatcagagttcgcctcgcgcacaatggccgggtataaaagactc

SEQ ID NO: 51709 - DNA, 476 bp, Mus musculus
  source 1..476: mol_type = other DNA
ccattttatgtgcaattacagtaggtcaattaggacatatatctgtacacctggatatttattgacatgtcaaccaaggagtaaggttacactttccccgactggtgtctttaaatacagtttacagtaggccagtcaggcataatagtacagacttgtaatcctggctcagctaagactacacagtcggatttctgagttagaggccagccagtgttacacagagaaccttttggaggtcaacctcagctacaggatgacacaatcagatgtctacttctgcctacctggcgtcgcagcatcagctgcttaggcgttgggacggtcatgacgcgctgcccactccagtcaagtaggtgacgtctctggcccgcaatgccgccacgcccctttgccccacgtgtctgcgcagcagaccctccgcgggtcggggcggagcctacatggagagcccgcccactggccggcccacatcg

SEQ ID NO: 51710 - DNA, 629 bp, Mus musculus
  source 1..629: mol_type = other DNA
cggcgagcgggagacgcgcgtgggaggcccgagccgactccgtcacgggcgctaccaagtggcagtcgcgggaggggggacgcgtgtcaccgccgcccggcgctcccgggagctgccactcacctggcgggggccgggcgacggggcgaggacacgccccaccgcgcggccgcctggagaggatggcccctggcgggagagccgggactgcgctggctgcccggtggactggctgccccgtggactggcctgcggcaaggccacacgtgcgagcgcgaccttaggatgcgacaggcctctcgcgtgccgccagagtcccgaagcctgtccggtgtctccggtggtgctttcccacgtggagaggaactgcacaagggggagcaaagcttccccacgcgcgcggcggggtgagcgaggcggccgcggcacatccacgacctcccggaagtggcatggtgggcgcctcggtcacccggcccatcgcccttgctgcagccattgccgcagccgctatgccgaaacgaaagaagcaggaccagccgccgccgctgccgcagcagcagcaacatctcgcactgtctgccccatgggtgaggggcagggcgtgcacacgcctgtcagccggccag

SEQ ID NO: 51711 - DNA, 605 bp, Mus musculus
  source 1..605: mol_type = other DNA
agcctctgggccccaggccctggcggatcatcccgccgctcccggctaccgctgcggctgttggaactggagcgccggttcttaggggacctaaagccccccgagccggtagccccaaccccgtcccggatgggcctggaggtcgtcacagcgccctgtggcagcagctcccgccgctgcgggaaacccccaccgtggcagcccacgcgggatcgcgagagcccacccacccaccccccgcccgcggtgccgcggcacagccctcctccagagctgcgcagcggccccgcccccctcggcatggccccggagccccggcccgccctccgccgagctccccgccgccgcaactgactccccggggcagcccccgccggcggcccggggccctggggaggcggggccgcggtgacgtcagcagcgagcagtccgcgggtccgggatgcacggtgcggcgagcgggagacgcgcgtgggaggcccgagccgactccgtcacgggcgctaccaagtggcagtcgcgggaggggggacgcgtgtcaccgccgcccggcgctcccgggagctgccactcacctggcgggggccgggcgacggggcgaggac

SEQ ID NO: 51712 - DNA, 598 bp, Mus musculus
  source 1..598: mol_type = other DNA
ctggccggctgacaggcgtgtgcacgccctgcccctcacccatggggcagacagtgcgagatgttgctgctgctgcggcagcggcggcggctggtcctgcttctttcgtttcggcatagcggctgcggcaatggctgcagcaagggcgatgggccgggtgaccgaggcgcccaccatgccacttccgggaggtcgtggatgtgccgcggccgcctcgctcaccccgccgcgcgcgtggggaagctttgctcccccttgtgcagttcctctccacgtgggaaagcaccaccggagacaccggacaggcttcgggactctggcggcacgcgagaggcctgtcgcatcctaaggtcgcgctcgcacgtgtggccttgccgcaggccagtccacggggcagccagtccaccgggcagccagcgcagtcccggctctcccgccaggggccatcctctccaggcggccgcgcggtggggcgtgtcctcgccccgtcgcccggcccccgccaggtgagtggcagctcccgggagcgccgggcggcggtgacacgcgtcccccctcccgcgactgccacttggtagcgcccgtgacggagtcggct

SEQ ID NO: 51713 - DNA, 662 bp, Mus musculus
  source 1..662: mol_type = other DNA
cagacagtgcgagatgttgctgctgctgcggcagcggcggcggctggtcctgcttctttcgtttcggcatagcggctgcggcaatggctgcagcaagggcgatgggccgggtgaccgaggcgcccaccatgccacttccgggaggtcgtggatgtgccgcggccgcctcgctcaccccgccgcgcgcgtggggaagctttgctcccccttgtgcagttcctctccacgtgggaaagcaccaccggagacaccggacaggcttcgggactctggcggcacgcgagaggcctgtcgcatcctaaggtcgcgctcgcacgtgtggccttgccgcaggccagtccacggggcagccagtccaccgggcagccagcgcagtcccggctctcccgccaggggccatcctctccaggcggccgcgcggtggggcgtgtcctcgccccgtcgcccggcccccgccaggtgagtggcagctcccgggagcgccgggcggcggtgacacgcgtcccccctcccgcgactgccacttggtagcgcccgtgacggagtcggctcgggcctcccacgcgcgtctcccgctcgccgcaccgtgcatcccggacccgcggactgctcgctgctgacgtcaccgcggccccgcctccccagggccccgggccgccggc

SEQ ID NO: 51714 - DNA, 403 bp, Mus musculus
  source 1..403: mol_type = other DNA
tttaggagcacttgattctctataactggtggtgacgttcagatagctgtgcggctacagctcatctttatgttgaaatattatgtatcagtaggtagtaagtaatgagtctgcgactccgcagtgccacctgctggtcaagatgcgtcatggctgcgcagacgtcgcgccctttaaccccagcttttcaggctgagacaagaggatcacaaataaaaattatcttagagagatttcaatggttggaaaaagtcatttatttatttatttatttatttatttatttatttatttatttatttatttatttatttatttgtcttggaattcactctgtagaccaggctggcctcgaactcagacaccaaccccccataggttcaaaacggtccccagctgctag

SEQ ID NO: 51715 - DNA, 330 bp, Mus musculus
  source 1..330: mol_type = other DNA
aatgtggcacacattcacgcacacactgtggtagtttgaaatggagacccttcccctggctgcctggaagacagtattctggagagctctcagctctatctccagcaccatgcctgctttcatgctgccatgcttcctgccttgtgtaagagttgccttggtgtctcttcacagattaaaaataagatgaatctttttttctaaaagaaaataacagaaataattacactgaaatgactgcagctgaagtctgacagactgacagtggggcggggctctaacactgtccccctaggggcactagcctgcaagcaagtaaagcttgaaact

SEQ ID NO: 51716 - DNA, 433 bp, Mus musculus
  source 1..433: mol_type = other DNA
atatccacatataagtgaatatgtaccgtatttatcggttttagcatagtgagatagaaaatggtttagtgttcagctgttaagagcttatacctaagatcatgcaaggaacctgaggtcagatcccagccctcaagctccacatgatttataaaggagagacggctcagcggctaagagcactgactgctctctggctcacaaccatctgtaatgagatctgatgccctcttctggtgtgtctgaagacagctgcagtatacaaatgtacatacaataaataaataattctttaaaaaaaataactactcccctttttgcaagagaaagggggatgtaaagttaattaattaactaattaactaagtcgaagcttcacatgaaaagggatcctactgctttctctttcataaagacacaaatgattttctaa

SEQ ID NO: 51717 - DNA, 255 bp, Mus musculus
  source 1..255: mol_type = other DNA
caggtgtgatgactctacacaggagatttcctccggcaacttggcaggttcattgatctcctgagtttgaggcaagcctgacagacagacagacagacagacagacagacagaggattccacagacagcctgacggagtgaaggaacagctctttcagcgctttctgggcactagtctgtgcaaatccctggcaggcaaggactctcaggatagatattgatgacttggcctaattatttgattggctaataacg

SEQ ID NO: 51718 - DNA, 287 bp, Mus musculus
  source 1..287: mol_type = other DNA
ttgtatgaatgtccatgtacttatataagtatgagaaaaagatgaaaacatcttcccatttctcagaagagtggaacctgacaggagacttttaggaatttagaacacagattcctgagcagcctggcttggcagtgtgagaacacagaccactggtctctgtgtgaaactgtgcttgcaggtcagagcctcctgctttcaagaaaacctctgattgccacctgacattctgggcagggctcagaccaagtcctcctgggttgcagcagcacctcccatgcccattg

SEQ ID NO: 51719 - DNA, 362 bp, Mus musculus
  source 1..362: mol_type = other DNA
aagcgcaggacctgcatgtcgtccacatagccgggaggaggagcgcgatgagaccccgacctcctcctcctcgatccccatctcgatctcgagcgggagtgcgggccgggaaggccgagtccaggatggtctggcatccagctgcaggagcgcagaccacagcggccctgaggacccaggacatctgggaaaattacagtcgcgagtgattggaaaacaccagaaaatctgaattttaaactccagtggcaaaattgctctcaaccctgcctggggagaggagggtcgcagaaaaaggcgttcctttcgttattagccaatcaaataattaggccaagtcatcaatatctatcctgagagtc

SEQ ID NO: 51720 - DNA, 344 bp, Mus musculus
  source 1..344: mol_type = other DNA
aggaatggagttggaacccactgggctcccattccttgctccacagggcaggtccctggctcagctcagggggaggaactcacacatcctcctccctcagctctcactttttgtcaactccacaccagccctgaattgagaaattgcttccatccaggatgcttttgagaaagtctataagacattttttaattattgttaatgatcattatggaaaggagcaagccatgagctgccttcagtaaactgaaagaaactctttctttttcaagcctcccttgccctggagcagcaccactctggggatctgatgccctctctgacctcctgaggttccctaaagt

SEQ ID NO: 51721 - DNA, 435 bp, Mus musculus
  source 1..435: mol_type = other DNA
ctaatatccacatataagtgaatatgtaccgtatttataggtacattaatagtgttcagctgttaagagcttatacctaagatcatgcaaggaacctgaggtcagatcccagccctcaagctccacatgatttataaaggagagacggctcagcggctaagagcactgactgctctctggctcacaaccatctgtaatgagatctgatgccctcttctggtgtgtctgaagacagctgcagtatacaaatgtacatacaataaataaataattctttaaaaaaaataactactcccctttttgcaagagaaagggagtgaattaattaattaagtcgaagcttgcacagattctgcaacaagacttggagaaacagtttgtgtaggtctgaaaagggatcctactgcttgcttcctgtttcataaagacacaaat

SEQ ID NO: 51722 - DNA, 348 bp, Mus musculus
  source 1..348: mol_type = other DNA
cagactgggttctgtgcccagacccacagtgtgatgactctacacaggagatttttgctcaggctagtcaacttggcaggttcattgagaaaaggcaagcctggcgttctgacagacagacagacagacagacagacaggagtctcacctgggttcctgtgtcccatgagagggcctgtgcagtctcccctggattccacagacagcctctgaacaggtctcaggataaaggaacagctctttcagctctttctgggcacttccagaaatccctcccaggcaatggctctcaggagatattgatgacttggcactagtaattgtcatgacgaaaggaaccccttttac

SEQ ID NO: 51723 - DNA, 409 bp, Mus musculus
  source 1..409: mol_type = other DNA
ggacctgcatgtcgtccacggaggaggagcgcgatgagaccccgacctcctcctcctcgatccccgatctcgatctcgagcgggagtgcgggccgggacatccgagtccaggatggtctggcatccagctgcaggaggcagccacagcagccctgaggacccaggacatctgggcaacttcaaattacagtcgcgagtgattggaaaacaccagacaatctgaattttatgtcaattcttccagtggcagaagccgccactgggtctgaccttgctctcaaccctgcctggggagaggagggtcacggtaaaaggggttcctttcgtcatgacaattactagtgccaagtcatcaatatctcctgagagccattgcctgggagggatttctggaagtgcccagaaagag

SEQ ID NO: 51724 - DNA, 279 bp, Mus musculus
  source 1..279: mol_type = other DNA
tgagtgtccatgtacttatataagtatgagaaaaagatgaaaacatcttcccatttctcagaagaaacacatattcccagcctggcttggcagtgtgacctaatggaacacagaccactggtctctgtgtgaaactgtgcttgcaggtcagagcctcctgctttcaagaaaacgctcagatagaggatgctatctatacacagggctatgtacaggaggaaggaccaagtcctcctgggattttgcagcagcacctcccaggcccattggaggaggttc

SEQ ID NO: 51725 - DNA, 483 bp, Mus musculus
  source 1..483: mol_type = other DNA
gtggactaggccacggggcggtgcgggtgagcggcgctgaccttgggatcccggtgacgtggggtcggacgggcgcctcctccgcacgcggagcgtggagtcgctccgcagatacctgcagctcgggaaggagacgctgctgcgcacaggtgcaggggccgcgggcagctcctccctctgccctcgggctggggctcagtcctggggaagaagaaaccctcagctggggtgatgcccctgtcccagaagggagagtgtgtccctgggtctcttgatcccttgtcacagtgactgcactgactcttccagggctcagccttctccctggacagtgcccaggctgtctcaggagggatttccctgaggtgacaacagctgcacccactgtctgtggacatggactcctgacacctcaggacctgaagtcgcctttactgaagcccttatgaggaatataaatactggaatttctttttctttttt

SEQ ID NO: 51726 - DNA, 475 bp, Mus musculus
  source 1..475: mol_type = other DNA
tgacaaacagtgtaatctcacaataatcgatcttttaatgagaaccctgacttatcttgtgtaattatccaggttagcaatgtaaaaaaagaaaaagaaattccagtatttatattcctcataagggcttcagtaaaggcgacttcaggtcctgaggtgtcaggagtccatgtccacagacagtgggtgcagctgttgtcacctcagggaaatccctcctgagacagcctgggcactgtccagggagaaggctgagccctggaagagtcagtgcagtcactgtgacaagggatcaagagacccagggacacactctcccttctgggacaggggcatcaccccagctgagggtttcttcttccccaggactgagccccagcccgagggcagagggaggagctgcccgcggcccctgcacctgtgcgcagcagcgtctccttcccgagctgcaggtatctgcggagcgactccacgc

SEQ ID NO: 51727 - DNA, 394 bp, Mus musculus
  source 1..394: mol_type = other DNA
gggcctctgtccacagggcaggtccctggctcagctcagggggaggaactcacacatcctcctccctagtgactgtttgcatttgttaactccacatcctgaattgagaaattgcttccataagtctataaggcatttttaaattattatgaatgatcagtatgagcactgatgaaagaaaccctttcttgccctggagcagcaccagtcctggggatctgatgaggaaccaacagctcctccgcgggcgctggttataagcccgagggcctcaatgccctgtatcccagatgggacaatggcgcagctggcggccgccctgaccctgatcgagacccgcgcgggtgagtgcggaggggcggggacggcactgtggaatccgcgtccccccgtc

SEQ ID NO: 51728 - DNA, 378 bp, Mus musculus
  source 1..378: mol_type = other DNA
tagacacagtgttataactagactctagcttcactggagtcagactccagaccctttcctgataaagggtgaggtcccaggagaactctcttcctcccatgtgtgtgtgagagagagagagaggaaacacagcctgagttctgtctcaagtcagaatcaggcaagaatgtctgattcttcagtatctcctttgagacagtgataatttcacatttgcttcagaaatagtccacattatgtattgttccaaacaagaggaatctttacataaagacaactcctggacctaagaaacacttattgtttaaggacacaaaatcagtgtaataacagtaacatgtcattcaaaataatgttcagaggcggggccagcgcggc

SEQ ID NO: 51729 - DNA, 309 bp, Mus musculus
  source 1..309: mol_type = other DNA
aggtaagaaaaggtccaggaatggagttggaacccactgtgctcccattccccattcacagggcaggtccctggctcagctcagggggaggaactcacacatgctcctccctcagctctcactgcatttgttaactccactcctgaattgagaaattgcttccataagtctataaggcatttttaaattattatgaatgatcagtatgagcactgatgaaagaaaccctttcttgccctggagcagcaccactggggatctgatgccctctctgacctcctgaggtagcaggaaccaacagctcctccg

SEQ ID NO: 51730 - DNA, 312 bp, Mus musculus
  source 1..312: mol_type = other DNA
ggcccagggtatgcatgggtccctcaggcaaacattccctgtagccttgtgcatgtgcacagctcctgtggaggcagggggatgcagcctctcctgaaggagtgcttatcagctcctctgtctaacagcagagggactgtgcagaaaacaagcactggatccagttaactggacccttacctgataaagggtgaggagtcccaggagaactctcttcctcccatgtgaaagagagagagagagagaggaaacacagcctgagttctgtctcaagtcagaatcaggcaagaatgtctgattcttcagtatctc

SEQ ID NO: 51731 - DNA, 240 bp, Mus musculus
  source 1..240: mol_type = other DNA
acagacatccacagactcctttttttttaaacatattttttcaattagatattttctggccactcataaatgacccacttctgtatttgccaggcacaggcaaagcctctgctgacacccatcacagtggggccacagatagaggatgctatctatacacaagtcccgttcaaaggccttgcactcctgttgagagcaggtacttagaataaaactctctgagattgcaagttacaaagt

SEQ ID NO: 51732 - DNA, 344 bp, Mus musculus
  source 1..344: mol_type = other DNA
atatcttaattaattatctaaattaacttaagaataccaccacttaatgactgttttttttttccttaatgaaagtaagttttattacatcaagttataaatacaaagatgcaacaaacttctgcatgtgtaacctgtgcattttaaagactgactacaaagcactcagctccatgaagcagggtctacactgtaaatagcttgctgtgaagtggcttcacaaacgtctttcaaatgtttggaaagaaaaaatgagctgggtcattcctaactaattaaaatgcacattgtcagttagtgcaaaatgtaaaaaattattgccgtaaccaggcttccgacatgaa

SEQ ID NO: 51733 - DNA, 333 bp, Mus musculus
  source 1..333: mol_type = other DNA
taagtacccagggtctctgagccagcagtctggttccccacagatcctgcaggggcctggatccctctgcatgtagctactagcccttggaacagcaagtgcctatggtagtcctacctcaacctctccagtggtgagatagccagaatataacaccagttattctgggcattgactgttttaaaagacaggacttcggtcctgttatgtttatgtgcctgcacacagaagacctgtggggtcctctggtttctgacagaagctggtgcggggctgagggcccccccccctcccgcactagacgttgcgcactgcgcacgtctggggcgggac

SEQ ID NO: 51734 - DNA, 458 bp, Mus musculus
  source 1..458: mol_type = other DNA
agtgacgttgaaagactgcagtcaccactgatttgttgctttgcagccatcccagctgcacattcttggaaaggaagaaccatgtcatgctttccctgaaacagtgtgttactgtagtgtaactcattaagaggaacttcctatgacgttagaagtgcagtaattatatatgaagttctttaaagtagtaatgagttctagggctgatagtcagttttaatagatatgtagatatattatttgttttacaaatcttactttggcttatgtgacatatctcatttaattcaagctaacctagaactcattgtgtagcctacgttggtgctagggaaatggctccttttcattgctggtattgaaaaagcagaggtaaagaaattctgggcactgctgatatttgctgactcaaaataataataaaataataataacagtatggggcttcatctagacct

SEQ ID NO: 51735 - DNA, 509 bp, Mus musculus
  source 1..509: mol_type = other DNA
aggtggtgcacaccttaatctggggaagttacttgccagcacatctgtcggcaactactagattctcattaattatagagagagaaacattcactaggttctgtagctctagagaaccggaagtgacgtgccagcatagactctcaggtcggccacggccgcccaggcctctgcggttcccagccccaccgaggaccagcttgagcctctgcgggctcgctgaccgcgcagctctgccagcccagccacggcgcgctgcccgccatggggttcggcgtctcgccacgcgcatgcgcggccctcagtctccgggggaccgctctggtcacctgggcgccagcacctcagccacgggaagcggcgggttccctctcgcccggtaaactagccgcgcaggccctcgcctccggctctccgcccgccacccgccgcgggcccgactaggccctggcacggcggctcggcgccgcgcagctgtcttccatcgccgcagcgcggcttcccgccgc

SEQ ID NO: 51736 - DNA, 331 bp, Mus musculus
  source 1..331: mol_type = other DNA
ccctcaggggggagggatgcggcagcatgggcctgcagaggcacccctcctctctctccttatctttttataaaacacaacaaggaggctccatctgctctcccagagaaacttaagccagtgtttcctgagcacaggatttggtcctcctggcatcctagatgcaggggcagcaaagcaccgaactagaccggttttctacactccagctccagggacttgactatctgcctgtgatccagatcttgaggctggaagacacaagtttctgacctggatcttgacatggagatcttgaggtacagtgaggtggtgcacaccttaatctggg

SEQ ID NO: 51737 - DNA, 344 bp, Mus musculus
  source 1..344: mol_type = other DNA
ccctaattgccctccactaggatgtaaattgaataaacatatttttaaaatcccaagaatatctaatggaaatgtaatttggaaaatagttgttactttttgtaaacattcaggctggcctttaatatgtttgatgaagcagatttcacaaaattagagttttaaatgtgatgaagattggttgacacaatccacacaatcatgattcacgtcagccattgtagacatcctgacgtattgctgttactgagtcaatggtctatcacattgactcagaagaacattgtgttcatgagctagatctgagctggcgattcaggacgatttctagattataaaatgaa

SEQ ID NO: 51738 - DNA, 492 bp, Mus musculus
  source 1..492: mol_type = other DNA
actaacaaatgagcaaattgttttggacgctgaacatgtacatatattgcagatatggaactccatcttcatgtggtgcccacaacaagttgagcaagaatacattacccaaattggagaggggcctccacctcaggatgtaaattgaataaacatatttttaaaaattccaagaatatctaatgggaaatgtgagaataaaaataggcagaagttgtattcaactcattattgtattttggaaaataattgttactttttgcaaacattctcttcttatgtactttcttaatgtttgatgaagcaaatgtcacaaaattagagaagtgtgatgaagattggttgacataatccacacaatcatgattcactctgaggagcattctctttgtcaattgaattgctgagtcttactgagtcaatggtctatcacattgactcaagctagatctgagttggtgaatcagagccctagggactgctctaatggga

SEQ ID NO: 51739 - DNA, 371 bp, Mus musculus
  source 1..371: mol_type = other DNA
ttctttggaagtagcaggacctgcagagcagaaagctaggctctcaaagctcctgtagagggcctcagtaccagatattgcaggtgaggacaaccagaatagatgttctcatgtcccatcattgggatttgaaagccagttgttctgtacagcaggaacagcacctgccttgtgtaaggaaggctagttgtcaaaaatggttcatcctagccaggagcttcgaaaatgatatttgtgatcaggcccctcgaaagctatgggggcttcagcaccctaacctacacgaggcctagtgatcagtgacgtcatagtttggcaagagccaatcccagggctggtcccagagaaatctcggcggagggcccggagct

SEQ ID NO: 51740 - DNA, 358 bp, Mus musculus
  source 1..358: mol_type = other DNA
aatactagcgatatatcacatgtctctgtagtgatgtgaaatcgtttaggatcctggcagcttgtccacagggcaggagaatgcccagggaccctggcgagctggaatccaaacgtgcatttgggctcgaaattcgaggtcagtctcaacatcacaggctggactctgatgccgagattccaggagagtggagagctaggtcacctgcctgcccctgggaaacgctgggtagtcaagacgccctggagtttggacctgcttagctgctgggttctgggcgtggcagccaggtgacctcgctgagctgacattccttgcttctgtgacagtgacgcacttaaaagtgactcagtttcag

SEQ ID NO: 51741 - DNA, 379 bp, Mus musculus
  source 1..379: mol_type = other DNA
cagtaataataaaaactatataatttaaagaactttagcaatctattagtgagtttactgtcagtattcaaaatacccatacaaccagaaacatttacattgcatatatgtgactttcactgattctggcctctgagctgctatacaagcagaggctgtttctcccatctctggataacaggtgctgagatcacaggtctcctggaagacacaaaactgtttaaagtgcttcctgatatgtagtcatggtaataaataaataaataaataaataaataaataaataatgctggctctatttttcacagttccttgtgctgtgcacaccccatggcagtagctgtgagtcaagctcctccctgcccctgaagaaaagatc

SEQ ID NO: 51742 - DNA, 280 bp, Mus musculus
  source 1..280: mol_type = other DNA
agaaagaaatgcttcttgttgtagtcacagttaggttaacatagatccattttgtttgtattcagacaacttagaccaatgcagcatgtttgggtatgtcaataagggtatttccagacagacttaagtgaggagggaagacctgccttattcttgacaggtatttggtcacaactaccaaaagagtaacatataccttgtggtatcctccaggctccgcatcacccaggtgtcacggtcatgtgacacatctagaatttgtggttccacatgtattaaa

SEQ ID NO: 51743 - DNA, 166 bp, Mus musculus
  source 1..166: mol_type = other DNA
gaggagctattggcaattgaccattatacaattaatactaactttcatgtgagtaaaattaaaatacacaaatctaaaacatttttatttaaaaattaacagtttgggttttaatggggagcaccgtcttccccactccccaatcaaggtccaggaagtcttgctc

SEQ ID NO: 51744 - DNA, 436 bp, Mus musculus
  source 1..436: mol_type = other DNA
tttaaaaatgatgtaattcactcatttccctttatgtggcagttcaattgcataccactgtgcttgcacaggggtcagaggacacctctgaggagtcagtttcctccttccaccatgtggattctgggaatcagactcaggtcatccggttccacccctttacttatttctcataagcaattctgtaaacgaaaccatgagctgcattacgaagtacattgtttatcccaacgtaatcgtgagtacaggtacctgcagtgggtggttatgggtgccctggaactcctgattacagtgtgtgccaacactttaagtggggagggctaccacaatggaaatgctgcagctctgagggggagccccccccccatgtacatgtcctcacaaagatttattgagagctacttcaagccaagcccagggattggtgggattt

SEQ ID NO: 51745 - DNA, 179 bp, Mus musculus
  source 1..179: mol_type = other DNA
attgtaggcgcctgcttccagctctccgggcccccaacccccagatgtaggtgtgccagccacctgggatgactcatgccctggcaatgtgagcacgcatgccaagagcgagcctgggcatccggctaggttctagaacctagggatgaggcattacgcaaggtctgctgcagtcagca

SEQ ID NO: 51746 - DNA, 267 bp, Mus musculus
  source 1..267: mol_type = other DNA
tacaaaaaagatgcacttatatgtattatacatatatcttatctaaatctagtttctcattgtaaggaaacaaaaactggtatttttggattttaacaaaatttaaccagatgaatttggatttgtgctttaatcttagggcctactacagtcaaaaaatttcaggtttagtgtaacccagtgtatttcctgctcctggataaaaaggaatttggagatagctccctgtcccactttgcggcggaactattctggcgacgcctgctt

SEQ ID NO: 51747 - DNA, 313 bp, Mus musculus
  source 1..313: mol_type = other DNA
tccaaagaagcgcttttgattaataactaacctcccacatctggcaagtgcctaagattagagcgaatgggcaagaatgcttctcggttttgctgttggccactgagcagccgcaaaaggtgcggctctctcaatccaagcgaatccgttgctctggaaaaggggggtgttcccaacctccctacaaaagcagtaataatccaggactagtgcgggtgctgttgacgtcacgacccaacggccaccaggacgcgaagacgctctagccctccgggcgcactcgttgcccgacgccttgggatcgggcgctcta

SEQ ID NO: 51748 - DNA, 253 bp, Mus musculus
  source 1..253: mol_type = other DNA
tcttgtctctgctttctgtacttgttgaacactactgaggtcttcactatgacagtgtcctgaattccaggcagcgttggggcgggccagctttattaaggcacaggattcccctggtctgacagcaagagtttggagtgctaggtaggaccctcagctgctggggaacctcattaggtccgatagagcgcccgatcccaaggcgtcgggcaacgagtgcgcccggagggctagagcgtcttcgcgtcctggt

SEQ ID NO: 51749 - DNA, 259 bp, Mus musculus
  source 1..259: mol_type = other DNA
cttgttgaacactactgaggtcttcactatgacagtgtcctgaattccaggcagcgttggggcgggccagctttattaaggcacaggattcccctggtctgacagcaagagtttggagtgctaggtaggaccctcagctgctggggaacctcattaggtccgatagagcgcccgatcccaaggcgtcgggcaacgagtgcgcccggagggctagagcgtcttcgcgtcctggtggccgttgggtcgtgacgtcaacagc

SEQ ID NO: 51750 - DNA, 212 bp, Mus musculus
  source 1..212: mol_type = other DNA
atgtacttactaaactcaaggggttaattttctttcttttctttttaatcaaaaacactctaagaatccacttcaagttcaaacacggaggatggggtccgtggtgctgcacttcctggcgaccgccctggtcccaactcaggccagcgcgggtgagtgcttgtctccaggtccacctgggttgacccccgcaaacctcggttcaccgactc

SEQ ID NO: 51751 - DNA, 404 bp, Mus musculus
  source 1..404: mol_type = other DNA
ccaggctggcagtttgaagccagcacagtctaaaagacatttaaaaaatgaaaatatcctttttatcctgtaagtaatcactgttggataatatgattgttaataagcccaattgcaatttcagactggagtcatactaacatatcaacaggttaaccagataagaaagcatctaagtgactttgagggtcatagaatattcaatttccagcaaccatatggtactcacaaccttctggtgtgtctgaagacagctacagtgtactcacatacataaaaataaataaatacatcttttaaaaatatgataaatgtggtggtcctcacatcacagctcctggcaccaggtgtggggggaaactgactgcatatctgaattctgaagaaagccattaggtcattat

SEQ ID NO: 51752 - DNA, 219 bp, Mus musculus
  source 1..219: mol_type = other DNA
ggtttctctgtatagccctggctgtcctggaactcactttgtagaccaggctggccttgaactcagagtgttataattccaatggaacttattaaaaacaaatccgacttgatgccacatatgggatggtaccaaacgaataggtgtcctggaatccgtaactatagtctaagtaaatacttatcttaggaaatggaatttctcagatctaaatttctg

SEQ ID NO: 51753 - DNA, 373 bp, Mus musculus
  source 1..373: mol_type = other DNA
ggtccgaggctacggctcagaagccgagcgctgggaacggcaggactgccgagcctcaagtagggctgagcgtgcggggacccgggtggagccgctccctcggtggagccacgagggcccgacacctgggtgaccgggcaaagccggcgggacgtctgcacagtccctccagcccagtggaagggtgaggccaggcctggcccatctcccatgccaggggggtgggagtcgggagggacgggacctgacctccggccaacagggctcctgcaccaggatgtgcagcagctcctgctgctgttgttgagcccaggctgtcctagaactcccggagatcctattgttaagacttgttgataaaggggtctaggtc

SEQ ID NO: 51754 - DNA, 171 bp, Mus musculus
  source 1..171: mol_type = other DNA
attacaaatacttgttagtcaagaatggcacgccataagctggcaagtagcctactgctggactaacggacctctacgccctcccgcgccgtgggcggtctagggaggggccgggatccggggcggctcctggggctcgggttgtgggaggcgccctctccgatctccccg

SEQ ID NO: 51755 - DNA, 285 bp, Mus musculus
  source 1..285: mol_type = other DNA
cactcacagaggcaggtgaatctctgtgagttcaagtccatccattagtttgtgaccaggatggtatatacaagacgctgaatgctttctattttttaatcactctcccctagatagtttttggtgacaataactcaggaggcagaggcaggcagatttctgagttcaaggccagcctggtctacaaagtgagttccaggacagccagggctatacagagaaaccttgtcggcagccactgctccagtgctgtgaggggttgggtcctcccagattctcccttcg

SEQ ID NO: 51756 - DNA, 385 bp, Mus musculus
  source 1..385: mol_type = other DNA
acctctacgccctcccgcgccgtgggcggtctagggaggggccgggatccggggcggctcctggggctcgggttgtgggaggcgccctctccgatctccccggtccccggcgccgccctcccggcaccgtgctctcgcggccgccgtcgccccggggaaggagagacggggagaccccggccgggctggagccagaacggggagccgcggccgggcctgggcccttgaggcccggggagagccgcggagcgggaccggccgccgaggtaagaccggggccccacgaccggggcttggcaagggctagcgctagccacagggccggaggagggtggggacaggcgctctctcctcctctcccccccagcccgtgcggctccgcccc

SEQ ID NO: 51757 - DNA, 215 bp, Mus musculus
  source 1..215: mol_type = other DNA
agcggcgaagcccggtagggggcagccgcgcgccggaggatcccagcccaccctgtcggtcggtcagtcggcgaggacttggccctaggaagcccacgcctcctccccaatgagaccggggatggaggcgcctccccgacgccctcccagaagccccccaccccaaggaggccgcccccgcccctcctcgccatgggcccggggggaccctgtac

SEQ ID NO: 51758 - DNA, 439 bp, Mus musculus
  source 1..439: mol_type = other DNA
gctagcaactgaactcaaattttctgtgagaacagtttgtgctcttttatgttcttaaggaattatgtcattacagtatcagatgacaatcattgtaagaataacactcctttctgaaaataaaattccacatacatgtaatgaaaaagattttctcttagagggaaaatatttgttccaatttactgtgagcccccatgtgggtactggttcaaacaagaatcctaattgagctcactggagattgcagcattcattaggggtacaaatgctatcagaaagtaagatgactctcaactaatatttatcatcatatctgttcagatcgtaacatatgcttagcaaatgtttgttgtgataataaaaattaatgagtgaatccatgtttttaatcaaaagaatcagaggctccagtaaaggatgcacctgttccttgttt

SEQ ID NO: 51759 - DNA, 338 bp, Mus musculus
  source 1..338: mol_type = other DNA
taatttggaaaatttacagagttaagctgtttaataaacaattttgaaaattagtttcatggagaatgtcaaacttatattaggagtatcaggtttcttgatcacatgtctctggcctcagggagatcagaatttaactgttgatgtttaaagactttataagcaaggttcttctatgttaacctatattaaaagaggggaacatatttttacaacataatgtatgtagcatcacaaattatcaagctagctagtggaagattagaaattcctatcttagaatgactattctatgcacagaactaggaatacaaatctgtgtacaaacagtgtccatt

SEQ ID NO: 51760 - DNA, 311 bp, Mus musculus
  source 1..311: mol_type = other DNA
acagttcatttatgacatttgtgactaatatgatttctgagtgaaaattgagtaatcatattgctaaaatcaactttagattcattagtctttatctcaatatttttgtttaaatattcccaaattgccaactgtgttaatgaatctgaagtcaggtttgaccataagacctcttggaacatttcttgtgaccccaagtgataattattggtagacctaataatataaaacaaaacgaaaaaaaaaccgttttgtttgttttagagaacatactgatcctagaatattaaaaatgttctataacccagcat

SEQ ID NO: 51761 - DNA, 337 bp, Mus musculus
  source 1..337: mol_type = other DNA
aatgatatagataaatacccagtactgctaaggggatatagaaataaaattactccttggagcattttgcaatataagtatcaatactcaagagtatgaaagcacatgtgacttcccagagactctggtaggatgcacagggcctgcacaagtgcaccagatgacatttataaaaattcaaatgtaaagttagttttcccagctgagtctcacttaacactattaatgatactcagctatggttgcaggtaggagcctagcataactgtcatctgagaatcttcatccagcagctgatggaaagccaaatatttggcagggctcagggagtcttgtg

SEQ ID NO: 51762 - DNA, 367 bp, Mus musculus
  source 1..367: mol_type = other DNA
ctcacaaaagtgatctatcatgattgccctctggatgcagatattttcacccaggacagaagctgctgatcccccccaagacctctcaaagagtgaatgctgtttgagattttcttaggaaattttactcattagaggataaaataggaaatattttatcttcctgtatcagaggaataaaattatgttaaatttttatatgtcttctttgtaaaggaataccttagtcacaatttaaatgtaaaacaaacccacagctttattttcaagaagaaatttgcagctcagagaatcctaaaatttcctcagagttttctcactttctcacagtgtgagacaagagacagtgaaataactttggtcagtg

SEQ ID NO: 51763 - DNA, 393 bp, Mus musculus
  source 1..393: mol_type = other DNA
aaaaatggacatccccattattgaaaacaatttcattttcactgatttgtctcatatacttcaacctgtaacataacagattaaaggcagtatcaaacaaaaaaaaaactcttctcagtatattttaagaattagtcatctttcctaaaacagtattctttcttataggttactaaaatctctcaagtgaattttttaagattctatttctagtaaaaaaaataatctaataaatactgatagagacaaactataattaggatttaccctaattcttaccaaggcacaaggagaggctcctagagtctccttaggggaattccagcaagggaattcctcacaatcctggagtttcccttcttttgatgctgttgaagttcctcattatatagt

SEQ ID NO: 51764 - DNA, 447 bp, Mus musculus
  source 1..447: mol_type = other DNA
ttataagcttaaaacaattaaaaattatctaaggaagatttgtaggttggaaaaattgatggaatatcagtgacttgttaaattacagtttaactgctgaagtaaattattgttttattctgatatgtttctaatatcctttcatattatcacaacaatctccaaattgaatcataagtatcaagtcatttttattaatgtcaaggataattttctctttcaaaaaatacatcttgttttataaagaggaaagacatactatactaaatgttcacaaacctaaaatttattatgtaaacttatgtttgtatattctttaatgtcttcaaaaatatgagatcaacatgagtctcttacctacatattgttggaccaaactatcttaaatattctaatgctcaaggactagaatccaagagaaactcctcaattaattcaattttctgg

SEQ ID NO: 51765 - DNA, 429 bp, Mus musculus
  source 1..429: mol_type = other DNA
ggttctatatatggaaatccatcaacataatccaaccacatgatcatctcgtttgatgctgagaaagcacttgacaaaatctaatactctttcatgataaaagtgtatgcctcttaaaagatagttaggcttctatttgcatgatagctgattatcttaaatagtgttagtctatcttaatctcttcagaacttaaggaaagaatatttgggggttgaagtttttgtatctgaattacatgggttagtcacttaagtctccacaagattcctggaatgcttgtgacaaaaatagaaaaatatttagaaatatagttaatctccctgtctctcatttgaaaaaggaacatggctaagatccaatgtcactgtcttatagtctgatgttgaagccaagagtaactcttcaatcaaaccactttgcttggaa

SEQ ID NO: 51766 - DNA, 263 bp, Mus musculus
  source 1..263: mol_type = other DNA
gcttgctgagttgatacagtcttcagtcctcctgagattatatggtctggggtcaggtggaaaacttttgctccccttctcctcagagttagggagggagaaaaagaattttctccatatgaaaattaaataaaaataaaaatatagaaaatttagtaatacagttattaacatagtgaatatggatatgagtaacccctacatatctcttatttgaaaaagtagtaaaggtcaaatgtcactatcttaaatattttgatgtt

SEQ ID NO: 51767 - DNA, 353 bp, Mus musculus
  source 1..353: mol_type = other DNA
tattgaataggtggggtttagtccctgatttttgtgggactgaaatcaacggggctggttatttgagaaaatcccaaagttaaactaggatcagattatctatctaaacaaacaaacaacccagaggtaggtgggtttattgcagagttctatcagaccttcaaagaattccaactctactcaaagtattccatgaaatagaaacagaaggtactctatccagctcattttatgaatttcctttatgaatatcgcccttccttgtctctcatttgaaaaaggaacaaatgggtcttatatattctgatgttcaagaatcagaagccaaatcaaaccactttgctttaaatagc

SEQ ID NO: 51768 - DNA, 331 bp, Mus musculus
  source 1..331: mol_type = other DNA
ctagcagacacagacgtgctcacagtcagggcctagtggactcactttgcttggagatctcacctcttcacaagaaggaattccatgcatgaaagtaagtttcttggtaagatgattgtctttacaatgctaatattaaacttgactatatttggaatgaactacaatccagaattggaaggctcaccagtgatccttatctgtagtggaccagaagattaaatctctgagtaaggtgtggtgtaacacacctttaatctgggctacacttttcatctgggattaaaggtgtggtggataacacctttaatctctacaccttctgctagga

SEQ ID NO: 51769 - DNA, 386 bp, Mus musculus
  source 1..386: mol_type = other DNA
taaattagtagccctcagttatacataacataaaatatcttagtgtcactctagtcaaagatgaaaatatcagccaatctcatggattagtatgattaacatactgaaaattgcaattttagaaaatcaatttaccaattcccaataaaaatgtcaacacaattctctacagaatttgaaagtactacagagaaataacaaaatctccatggaattcttaggcagattgttcaatgtagttgaatcaaagatcaaagtaaatgatttaaacaaagtgctattcccacatagtgaatatggatattcaggtgtataaaaaagtggatattttgacccaccaattacgtgtatgtattaaatattccaattgaaccgctttgctagaa

SEQ ID NO: 51770 - DNA, 457 bp, Mus musculus
  source 1..457: mol_type = other DNA
ctagagagacactgtaccagtttcactattcaaccagccttctcatttcctgtagaagacatcaactcaaggatcacatattttatattttatttctaaattatacaaggggtaagcaaaacaaatctgaatctgaagaagccagaaagctttctctcactgaagtctaaaaatagatagatagatagatagatagatagatagatagatagatagatagatagataggtaggtagatcagtagaaatatttatcaaggataaaagacttgtattatgctacaaacaaaacaaaaaacagtactttcttttcaaatattcattatttgtactgcagaggattttccacagtataagctttattttctaattgatttgaaagaggatatagaaacaaaaataatctggccttctgatacttatttaaccaatcacagagctggatttcctttcaaatg

SEQ ID NO: 51771 - DNA, 429 bp, Mus musculus
  source 1..429: mol_type = other DNA
caaataaattagtagacctcaattatacaaataacataaaatatcttagtgtcactctaataaagcaaatgaaaagatgaaaatatcagccaatctcatggattagtatgattaacatactgaaaattgcaattttagaaaatcaatttaccaattcccaataaaaatgtcaacacaattctctacagaatttgaaaacaaattctccatggaattgttacagaaacaggcagattgttcaatgtagttgaatcaaagatcaaagtaaatgataaattgtaatacacttacaaagtgctatttccacatagtgaatatggatatgaaaaagaaatattcaggtgtataaaaaaaagtggattttttgacccaccaattacgtgtatgtatcaaatatattgaaccgctttgctagatctctgaagaccc

SEQ ID NO: 51772 - DNA, 238 bp, Mus musculus
  source 1..238: mol_type = other DNA
tcctacatatcttgaagggaagacaaattttgggtcaaaattttgtggatgaattcttattttccaaaattatttgttgataaagatagtagaatagagacaagcaatactctattatatcatcacaagaatactaggtaaaatacacaatattgcttactacaactacagttgtaaaggagaattcttcccacagttctcactttaaatattctgggaaattacttggtgagaaaag

SEQ ID NO: 51773 - DNA, 760 bp, Mus musculus
  source 1..760: mol_type = other DNA
gtactacttgagactggtaaattattctctcctatttagcaaaacacaattcttaattctatcctgcttcatttttgtaacatggaaaaaaagctaagaagtagatctacacactcaataaaagcaatttaataagttgctcaatattatgtgtaaaaccattccaccagaaagtatattccaatgctgatggatttaaaggtaactggagttctttatcaatatactcttgaaggcattatcacattaaattttcaaaggtacagaaaacaattattttccaacgcaaattagctttggacacttcactttatgtgaggaaatcttaaattctcaagagatcatgaaatgtataatttcacactcattcctaaagggacaattagtgttaaattgtgcatgtatgtgtatctatttgcctttgagtaaagttatgctcatgtaaatatgtgttcatggagactaaattgtctaatcccctgcaattacaaaagaaacaaaactcattgttctatgtaagagtcctcacagctctgataagataaaaattatttgattaaaagtttttgaagcatttcctggcaaatatatacatacattgtattcactagaagagcataatttgtttctaatatacagtcatcacatgatgtcaaaatgtcagttagatgaccagcaataaaatctggcatgtcaaatcctgtgtcatacttggttaaccaagaccagtttgcataagcagattgtgctataaatagac

SEQ ID NO: 51774 - DNA, 550 bp, Mus musculus
  source 1..550: mol_type = other DNA
tttgatatgttgcacaatatcatgtttaacaccgttcaaccagaaaataaaggccagtgctggttgctttaaagataactagagttctttatcaatatactctttttattatcacattgaattttcaaaggtacaagacacagttgttttctaaagcattcaacaactgtgaggaaatgttgaattctcaagagaacttgaaaggtataagtctacactcattcttaaagggactttttttttaaaaattgtgcatgtagtatctaattgcttttgagtaaaggtatactcatataaatatgtgttcatggagacaaacaaaactcattattctatcacagctctgataagataaaaattatatgattaaaagtttttgaagcatttaatggcaaatatatacacacattttattcactagaaaatttgtttctaatatacagtcatcacatgatgtcaaaatgtcagtttaaaatctggcatgacaaatcctgtgtcatacctggttaaccaagaccagcttgcacaagcagattgagtataaatagac

SEQ ID NO: 51775 - DNA, 224 bp, Mus musculus
  source 1..224: mol_type = other DNA
cacaaataaacaattttttttatcaacaaatatttgttggtgtgaaaaatgagtgttcagtcaagcaatactctaccgttggattcatgggtggaaccatggctcccaccacatatgtatttgtaatgtaaataaacaaaataatataaaaaataaaggatgtgtaaaatatagatatattgaataataggcaagggggaagagtctccactccccatctcttg

SEQ ID NO: 51776 - DNA, 544 bp, Mus musculus
  source 1..544: mol_type = other DNA
gttatcacattaccaaagaaactgacagagcacttgagattgtgatgtaatatatgagcttgtgatagaatatgctggcaaattccctgaaatctaagaatttcatagaatgaaaatggtattttgaaataaaacaaaaataaaaaaatatctcaaacatttcattttgtgtacaaaatattttataatttcaagacattttcccacatactgcagtgcttcaaatggattattttattctgttatatggattatcaatttattttttatattactcacaagtcttaaatattatgataataaattgtcaaatgtgaatcatgtgtattgagtttcaagattctccaatattatcaagaataaacaatttttttcttcttatttgtaagtatgaaaaagcagggttcccatgtcattgatgactaatatagttataatgtaaaagaatatcagtctcctctcaccatctctttcggaattgaatcagagctactctttcatgtcattctcttaaatatactaaagaacaagaatcatttaaagg

SEQ ID NO: 51777 - DNA, 390 bp, Mus musculus
  source 1..390: mol_type = other DNA
gccaagaaaaaatacataaaagttttctttgcctaactgttcatcttgcattatgattacacttttatcactattgtcacataactatcatattgatctagacgtcaaatagtcagctgtgaagaccacacagtgttcattaatgaaggaaaactagctttttgacctgagtatagatatctttggtcaggaaattcaggtattaaaaagctagttttctgaccaccaaacttgtgtgtaacaaagaaccagaatgctaactctttgggaaagcctttaactgttgagtaaacagaaaatgataactttatattttaaaggggtaaatataaaaggcctcgtgacaccgcccccacgtggcggctggaggcggttatcgttgctcaccga

SEQ ID NO: 51778 - DNA, 660 bp, Mus musculus
  source 1..660: mol_type = other DNA
gctatatattcttgtaaccaacgagaatgcatggcccctgctgacacagacaatcaataatacatatttatttctggccaagtttgcttaacaaattgccataccctaaatatactgtttacaagctagtgatcttagcttaagataaagtatattaaaagttaagttatgctttggtaaaatgtatattctctaattactttaataaaccataggcaaaataccattaaatacaacagtagcatttatagtcttcaattttttattttatgttttataagacacattatgttaactcaacacctatacagttgttaaatattatatgtttttgtccaaactaactatgatgaaaattttgaactcttctgatcatcttaaatatataatataaatattctttcatcccttatttgttttcattctactttctcaaataaattctcaattttttcaaggaaactggtaaacacattatatattttgttcaaatctgcatcttttatagagcctagtagaatattcagtgcttaacaagcactgaagaagtgtctatttaatctaaacacatataccacattctacattgtatgggacattagctcaaaataattacattaaactctgtgtgtgcaacctaatttcacacagagagaagtc

SEQ ID NO: 51779 - DNA, 317 bp, Mus musculus
  source 1..317: mol_type = other DNA
agtatgagacttgaactgttccaggaatgatcctgagatggacaggaaatcttttctagcacacattcttgctggggaagtgggctttgacagtcaagctagccagtgagtcccttttctcaaatgaaaaagtattcttttcagaagactttaattaaatcagatgattaaaaaccatcagcctggcagatctctgtgagttccaaaataaaataaaaatttaaaaataaaaatcaagcttacttgttccttcatgcttaaatactttcagttttggaaaaaaaagaatgtgtggcctcaggctgctcctctagcgt

SEQ ID NO: 51780 - DNA, 191 bp, Mus musculus
  source 1..191: mol_type = other DNA
aaatattcaatttacgattcataaaagtgtcaaaattacagttacaatgtagcaacaaaaataattttatggttgttacacgcatgtggcattttgcagcggtgacctccagacgccggggtcacacccgcggccaacaccgccctcggattagccaatcggcgcgcgtctgatgacgtaaagacatacgc

SEQ ID NO: 51781 - DNA, 277 bp, Mus musculus
  source 1..277: mol_type = other DNA
taaaaattccttatgactacaattattatgtatgagatatactaaatgcaatcaaatgatcaaagaacatttttttttttttctagactagatcgaatccttatactgaaactagtttaaaccgacttatctcaacttaagagagagggaagatcaatattttcactccactctggggttatctcaaatgctaaatggcagaaaggccggcctgcggagcgtatgtctttacgtcatcagacgcgcgccgattggctaatccgagggcggtgttggc

SEQ ID NO: 51782 - DNA, 374 bp, Mus musculus
  source 1..374: mol_type = other DNA
cccaggctccagtgtagtctgggatctctggcaggcctcagctcaggggccaggcagcctggaaagtgttgcaaggaaagcgcatgcttaaatgctgctcccttttctttggccaaaagacagaatctgccccctggaggaggcgtggagccactccctcctaggttctgatggcccctgctccaatgggccagcgctcatgcggtgagaggcagcgcgcgcggccagccagggcgcggggaggccggggacaccgggggagggagggcgccactccccgcagcgcccgccgtccggcccccacgcgcgctcccgacttgctgcaacttgctgcagtgtttggggtagccccagcgcttacacatgtcacatgt

SEQ ID NO: 51783 - DNA, 280 bp, Mus musculus
  source 1..280: mol_type = other DNA
atcgctggaaagcaaactaggacagggtgcctctcaccgtgcaacaaacaaacaaacttgaaaaggatttttagttgctcttacttcagtaatagtgactaagaaagacattctgaattgttggcccccattaaaggggtggaaaaatctcactaccacttgttcctggaagtaaggacaagaaggattgtctcctttatcatctctggattgagagagagagagagggagtgtcagagtcacttggcacgtgactcatttactctcggcaggacctgtc

SEQ ID NO: 51784 - DNA, 472 bp, Mus musculus
  source 1..472: mol_type = other DNA
catagaactgacccatttctacaaccttgacctgcattaccataagttatgtaaaacaagtataacttctaagtggggagttccatttaaactgaagctaggtcaagtgaaattctctgataagtaaagctgtcaagacagctcaatgggtaaaggttcttgtcattttggccagcctgatgacctgagtgcccagcacatgtgccttccaaagtagagactagctcataatttcctggccactttcatagttacaggtaaaatgcaacaatagtcctttaaaaccataaacaatggtggcacaagtttgcatgttgtcacccctgttctaattacaccagagaagatacaacacagactctcctgtgatcatctgagataaaacaagtgactcactttaatggattcacttcagacaagagaaacctgtaatttcgtgcttgacagacccactgtgggggtgaatcacagc

SEQ ID NO: 51785 - DNA, 703 bp, Mus musculus
  source 1..703: mol_type = other DNA
aaaattaaggtcatattaattaaatttgtcaataagttgaagaaagctcgtgtttgattacaagccttcatattgactctagaggaaaaaaaaaataatgcctggcaatgtttcaaaccacgatgcctaatttagaacgatttctatttcaaaagagggtgtagaagtcatctttggccaacaagcggaatacaataatgtatgcctatgaaaaattcactgcgttaaacattgcttttgaggtgaactgtggggtccccacatttgcgggggggggaaggggaccccgccttgaacttcgattttagatctctcacaagcgacacctttgcaaagcagccagctgtgtcgtacaccctgcccgcagcccgccacacctggaggatggtggcgcgcgcccccgcgtgacgtcaccgcacctggcaccagctgccggagcctgggtggcgcgcgcgggggccgcagggggcgtggcctctcgcgagatttcgccccagccgggtcccgactccgtggcttgccaccgcgttctcgagcgtggcgcgctccgcctccgagggagcgggtgcgggctgaccgtgcgagaccccgccaagtgcctcagccagctgcgagcggaagcggcccgggagcgtggctgagtgcgccctgtgctcaggcgcggaccccgttctccaccccccctcccacccccgcctgccgg

SEQ ID NO: 51786 - DNA, 382 bp, Mus musculus
  source 1..382: mol_type = other DNA
ttccttttgctccactgtgagaacacagcagacctcaaaacacagcgtttgggaaccaacacacacgtctcttttcctttaattgattgattgattgattgattgattgattgatttgtaagccaggcttgtgtagaactccaattttggctggcctggaattggagaagttcatattctcattatacagagtgcttaatgaggtcattcattcattcattcattcattcatgcatgcatgcatgcatgcatgcatgagataggagttttctgtgtagctcagaatatgaaaatctgttgttaatatttatgttaggaaaagaaaatagtctctgttttacatacaatctacttggaccaaggggcaccctctcctccccga

SEQ ID NO: 51787 - DNA, 301 bp, Mus musculus
  source 1..301: mol_type = other DNA
tggcttgtagcctagggcttcagatggccttgaactcaaagcaacagcatctcatatgctgagattatgaattcagggacattttcctctttgaaatatgttgaccacaaagctcattagaggtcacccttcagtttctaagctggatgaaaccttagatagaacgtgatctgcttcagctttgagtaagacctttggaaaagaagagatcttatctaccctccctttatggggtgtgactccccaaaatgtccagaaagggtcctgatctgcatgcccaagagcattccctcaggcagca

SEQ ID NO: 51788 - DNA, 400 bp, Mus musculus
  source 1..400: mol_type = other DNA
taaagtttcagaaattgagcagcatttctctctctccacgtctccttatcttcaaatattgttgctgagatgatgttgaagtgtcgcaggatgaatatcatttgatctacaaacgttcagtttctgggtaattttaattttccttacacagtctaagtatatggtcaatgtgtccctcactcttaagtgctatcgcactaatttttttttttaacttctattggagaaagaaaagcaagaacaaggctcaaacaagtctttccacttggaggagaggcttctccataagaggacctgaaggacttcccatgggcgtgagggaaatcgcacatgtttttctagagcttggaggagtgcagctcctggaggcaaaagcaaaggagtggccagacctgttcat

SEQ ID NO: 51789 - DNA, 359 bp, Mus musculus
  source 1..359: mol_type = other DNA
gctctgaaatcagtgccctaacagtccttaaagtttcagaaattgagcagcatttctctctctccacgtctccttatcttcaaatattgttgctgagatgatgttgaagtgtcgcaggatgaatatcatttgatctacaaacgttcagtttctgggtaattttaattttccttacacagtctaagtatatggtcaatgtgtccctcactcttaagtgctatcgcactaatttttttttttaacttctattggagaaagaaaagcaagaacaaggctcaaacaagtctttccacttggaggagaggcttctccataagaggacctgaaggacttcccatgggcgtgagggaaatcgcaca

SEQ ID NO: 51790 - DNA, 347 bp, Mus musculus
  source 1..347: mol_type = other DNA
tggttgggagtcaccacgagacaagcaacattttctgaacacaatttttaatgttattaaagagagcaaagtttccttatagcacttttacacatgagttcgataattatatttgctaattatcatagtttttttaaaaaactttcttttagacagtttcttatttattcttgcaaatttatgcctttgtgtgtaaattttgaaaatagtctgtaataaacatatagactaatattgtagtggtcatggacattttacaactcataaaatttgagttcatctttggtaatattatcatgccttaattactattcatatttctgatttttaaaactagtagactacgc

SEQ ID NO: 51791 - DNA, 308 bp, Mus musculus
  source 1..308: mol_type = other DNA
gtaatacaacagataaatttcaacctaatttccctaaagtttctaaacagctttagatgaatgatcggaagatgctttttgtgtctagcttggtgaaccactcccacacagcaccacagctccgtgggtgcgagctgagaaagagccaagaatcacccccacgcccttggagaggatgtttgtatttgcatggaaatgtttttacagcaatcattaatagcctagtcagactgagctatgagacggactcttcaatctctagtctggaacgtaatctcctcaagagatacgagccgtcgcgagccttg

SEQ ID NO: 51792 - DNA, 303 bp, Mus musculus
  source 1..303: mol_type = other DNA
tgtctagcttggtgaaccactcccacacagcaccacagctccgtgggtgcgagctgagaaagagccaagaatcacccccacgcccttggagaggatgtttgtatttgcatggaaatgtttttacagcaatcattaatagcctagtcagactgagctatgagacggactcttcaatctctagtctggaacgtaatctcctcaagagatacgagccgtcgcgagccttgcgcagcagcttggagctgtcaggaggctgggccacacgctcctcccctgtccctcttgcacagcaaccggaggagg

SEQ ID NO: 51793 - DNA, 432 bp, Mus musculus
  source 1..432: mol_type = other DNA
gactcatacatatgtgaggcacaaagatgatccttgtgggccagcagcatggctgtcacctagggatttggaaatgcagactcctggttcgaattcgtggcacagcccatatctcttggcctgccacattttcagataccaacactggtgaagtgggccattaaagcccttaaccagcctgcagagcagctgaacaccaactggagtaggtaactggcagtcaactgccatgacttccttccttctccagagctggtgaagtcttgcttcccaggggctgtcaagtcctttgaaggatttagcagatctaaatttcactgtggattttttttttttaattacagaagggtagacaccaccttctgtgagaactttggctctcacagctcaggttggaaccccagagacctcttagctacgcaagtggatctc

SEQ ID NO: 51794 - DNA, 383 bp, Mus musculus
  source 1..383: mol_type = other DNA
gttcttaatttggaataatccggatcccagaccctggtagaatcaaaactcttaaagcttataattagccgatcagatttatgtatcaataaaatctgataacgataaaagctttatcccaattttttctaactataatgtaattggatcataatcatttcttcttcagaatcaggaattccgtatgtgtggactatttcacaatggcgagaatgatgacagctactgttcaggcgctggccctcctcgtgtaaacacagcctttgacacaccaggctcagatcgttttgtgggaagttctagatttagatgtataacaataaatctccgacgtccacttgactgaaccgtgggagcccacatggactcatacatatgtgagg

SEQ ID NO: 51795 - DNA, 282 bp, Mus musculus
  source 1..282: mol_type = other DNA
cacctgggccagcgcaggcttagagtcacttggtctgcagaatacttactgaaaccccactgacatcctgcagtctgctatctgccaccagggggcagaatacaattctggactcctccccaaaacctttcagtagcttcttattggccttagaaaaatatataaaaagctcttgactgaatctgacttaagctcagagaaatttctctctgcctctgcttacaagcaaaaacagtgtcttattttgacacaaaagacattcgctgttgagtgaatgaatag

SEQ ID NO: 51796 - DNA, 358 bp, Mus musculus
  source 1..358: mol_type = other DNA
gattatggttctataaaggtcatccttacggggctcatgaagcgaggtctgaagatgcactccagccaggagtgaggctgcccgcccatccctcccccagcacgatgccgcagccactcgctggggaggccgaggcgggggcggccggtacctagctcggccacggttgcggcgcagccggacagtgcggcagcagcttctccactgggcaccgctggtcgcctgggaacctgccaccctgccggcgccgccgcgccgcccgcctggtagctggaccggtccggcggcctcaggacccaagaggcttctgggaaatgtagttcgctggtagctaggcgcccgctgcaaacagctagtt

SEQ ID NO: 51797 - DNA, 368 bp, Mus musculus
  source 1..368: mol_type = other DNA
ggatgtatacaatcgaatgcaattgactagtaggagatttctatggtaaattctatcttcaaagttaggtgccctagctgcatgtagctaggctacagaggctctggcaacctgctccaggtctccaacgcaccaggtgggcatccgggccctgcaaggcgcaagcgcactgctgggcctgaactaggccttgcctagaaccaggaaagttccagcctcagctggcaccgtgcttggcgctcggtggagggggagtccagcccctgcgatcctactggatgtccccaggcgtcccctgcgccaggaagccagccgagaaggcaggcagccacgcgctatctgagcctgcgaggcactgtgggcggttg

SEQ ID NO: 51798 - DNA, 380 bp, Mus musculus
  source 1..380: mol_type = other DNA
gattatggttctataaaggtcatccttacggggctcatgaagcgaggtctgaagatgcactccagccaggagtgaggctgcccgcccatccctcccccagcacgatgccgcagccactcgctggggaggccgaggcgggggcggccggtacctagctcggccacggttgcggcgcagccggacagtgcggcagcagcttctccactgggcaccgctggtcgcctgggaacctgccaccctgccggcgccgccgcgccgcccgcctggtagctggaccggtccggcggcctcaggacccaagaggcttctgggaaatgtagttcgctggtagctaggcgcccgctgcaaacagctagttgcaagagaatttgtttaaaaag

SEQ ID NO: 51799 - DNA, 298 bp, Mus musculus
  source 1..298: mol_type = other DNA
caccacaagtcacaggcttcagaatgggttcatttggttgagaagtaaatttcctagggacccaaagtcttacacattaggaatccctttcctggcaaaactgtgaaaccggcaatggtgtgggcagggctcactcacagcccctcttgagcactcaagagtggctagaggtcgacctgtcttctttggaaaggcattgcctttggggacaggctcctgtgtcaggttcctgcgccagtcaggggctttggcttccctagctgggggcgcgcccatctccactggcttggtcgagagc

SEQ ID NO: 51800 - DNA, 420 bp, Mus musculus
  source 1..420: mol_type = other DNA
cttcagaatgggttcatttggttgagaagtaaatttcctagggacccaaagtcttacacattaggaatccctttcctggcaaaactgtgaaaccggcaatggtgtgggcagggctcactcacagcccctcttgagcactcaagagtggctagaggtcgacctgtcttctttggaaaggcattgcctttggggacaggctcctgtgtcaggttcctgcgccagtcaggggctttggcttccctagctgggggcgcgcccatctccactggcttggtcgagagccgccggctcggcccctccccggagccgctttgtcccgggtgacggcggtggaggttgcgggagcaccagcaggaggcacagcccgggtgaccccacgacccggagagcgggaggcggcgctcagtgcgcacggctcca

SEQ ID NO: 51801 - DNA, 251 bp, Mus musculus
  source 1..251: mol_type = other DNA
gtaacgtcctctgtgccaggcactcggcaaaaagtgtctcttcaaagtctgactgccttcagtccgaatgaccttggcagccggctcaaatagaatttgtgacgtgctgggtttcctgcttactgtcccaggcagaaaactgtagcaccagtgactcagttcctcacgaacgctgcctgaattgatttagtccgagttcagatttagcacgtaatcatgttcaatttgcctgtgatgatgtcattggcatg

SEQ ID NO: 51802 - DNA, 296 bp, Mus musculus
  source 1..296: mol_type = other DNA
gcaccaaggccacagctgtggatgcttgtagccttaccagctgattaaatgttgaaacttcagttgtgacaatccagataaagatgaaaacctgggtttaattcccatggtgatacatgcctgtaatccccagaatttaaaactgagttccacactatggtgagctaaaacatccttcaattaaagcttactgagtgacgtcatcagtttatgatagtttcaggggcagttctgaggctactccgagcggatttttcaccctggtaacagtgacaagggccaatggcgttccagca

SEQ ID NO: 51803 - DNA, 595 bp, Mus musculus
  source 1..595: mol_type = other DNA
ccccttaagtatcttgtgtgtagatactgtaatgaaaacattttctgagcacttgcatcttaacagaggagctcattgagtatccatgcacaaacctctttgtcaactatgtctgggcaatacaaatattaaagaaatatatctcgggcaattctgctaattaagtttgaagttggataattcagctattaatactagttttaaagctgtggcaaaattagaacaaacttagtttgaggaccccaacagacttttatttgggactgtagaaaaaaatgaactggttgtttcagagtgtctttccttgtgcaggtgaaggcaaaaggaacttcttcgtcttctgcctaaaaaccaatgggtaagggagtcccattcaccgcgggctcgggcatccatcggcggtcggccccaggcgctctctgcggcgtcccgcagcagctgcgcactgggagcctccggagcgccccggggcagcgccagtctctgcgggggcccgcgcgcggggggtgggggggggcgtccgctactgcgcaggcgtcccaggaagcgctccgcggagccgcgctccgcccgcgtccgccgaccagatagtggc

SEQ ID NO: 51804 - DNA, 349 bp, Mus musculus
  source 1..349: mol_type = other DNA
gccaaagccagcctatgctatagaattctctctctctctgtctctgtctctctctctctgagagagagagagagagacagagacagagacagaatcagagacagaatcagagacagaatcagagacagaatcagagaaaagctgcagatctctgactccagcaccttagaattcaggatcttttcgtgcgtgattttgatggactaactgaacctcttcattaaaaaactagctctgtctgagctcgtacactgaggggtctctccccgcccggactgaccccgccccgcggccgtggtctattttgggcgcacccgcggcagcggcgcgggatcgctgacagtctcgg

SEQ ID NO: 51805 - DNA, 433 bp, Mus musculus
  source 1..433: mol_type = other DNA
gaatcgccggggattttggtaaaatgattcttaaacggcgttgaggctggtcggagacacccacgtgcttctgattcccatcagtataatttggggattccaaaataaacaaaaacataaataaataattactgaacttttttttaaactttttatttttaaccccccaaagtggggagtggctagaaagacttagtctgagacgaagactacactttacaacttattttaattaccaagctgtcattttttagttctttttattaaaaaagcaacccatccttattctccaataatgacaagataatcagacatccgttagagtttctaaaactattttgacaacacccattttggtgtcacctaagggggggcacctgccccccgccccaaccaatgtggggtggggttgggggcagggctcagaagtcaa

SEQ ID NO: 51806 - DNA, 288 bp, Mus musculus
  source 1..288: mol_type = other DNA
ccggcaaggagtttgcaagcagagctctggaaaggtaaactcctttttactgcaaagcagcactggctcacttttccatagacataataatgaaggaatttgaaaattaaaaagctataaccttctgaattaccacaagccttttgtcagcactttactttgagtactgtgaggtcacaaaccacatgattctgagtaatagtgcttgcaaaaaataggagttttaaagcttttgcttttttggattgtgtgaatgcttcattcgcctcacaaacaaccctttctccc

SEQ ID NO: 51807 - DNA, 328 bp, Mus musculus
  source 1..328: mol_type = other DNA
caaaaataatgtaaacgatactaattacatttaatctttattgtaagagccgccacgtaataaaaaaaaaaaaatatttaatatttgtccggcaaggagtttgcaagcagagctctggaaaggtaaactcctttttactgcaaagcagcactggctcacttttccatagacataataatgaaggaatttgaaaattaaaaagctataaccttctgaattaccacaagccttttgtcagcactttactttgagtactgtgaggtcacaaaccacatgattctgagtaatagtgcttgcaaaaaataggagttttaaagcttttgctttt

SEQ ID NO: 51808 - DNA, 404 bp, Mus musculus
  source 1..404: mol_type = other DNA
gccacaattaaatgttcttttaagagttgctttggtcatggtatctattcacagcagaaagtgactaatataaataataatagtaaaaataatataataaaaataatatttgaaatggtaggatagtggatattttcttttctaaaccttgtttataaagcttccccaatagtgaaagttattaactaaagcatgctttttaaagtaatgggtcctagaacggactgagtcctcacacagtgcttctctgaggagagagtctttccgctctgaggctccgccgcgtggctgcgggccgctccgtacgccgaggcgggagcgcgaagccccgcccccggagtgtgcaggcccgcgaccgcgcgcgctggccagccgggtgcgcatgcgctctcgccgcacggctt

SEQ ID NO: 51809 - DNA, 362 bp, Mus musculus
  source 1..362: mol_type = other DNA
ctttccctagggacctggggtgacaccaagtaattaattgcgcagagagtctgacaatttccacttcaccgagacttacaaggtccaggggcgagtgacgtgacgcttcccaagggtccctagggcgtcgcctcgaaccccttgtggctcttccaggaacttggcgctgcgagttggagctcctagaaagagaacggactcgtttgcatctccccgaggactcagcgaagtcctcgtcggtcgccgggatgcccagcgcagcgctccgttgctgcgcgcgacacgtcgggcgccttggcaccttaaggttgcagcctggccgcccgccgctaagatctcgcgagatttcccggggctgccca

SEQ ID NO: 51810 - DNA, 465 bp, Mus musculus
  source 1..465: mol_type = other DNA
cagcctgtcgaagcgctgtgcacggggaggtccggtcggcggccaccgggctgcagaagacaccaactgatcaaatcgggcgacaagtcgcgacctcgcccccggggtgagccaggtgacccgagcccgcacccatgcaccgcgagggtccccggggtccgcgcagtcgccgccccgcaccgcagacccccgcgggacagccacggctcccggagcttccccgcgcgtgcgcacacgctaccagagccggcggagggctgcggacggcggtaatccggggcatcttagcggcagagtgtcccggcaaggggcaaaaggccacttcctcccaagagcgaccttctgctttgaagagctctgcgcaggcgcggcgtgggcagccccgggaaatctcgcgagatcttagcggcgggcggccaggctgcaaccttaaggtgccaaggcgcccgacgtgtcgcgcgcagc

SEQ ID NO: 51811 - DNA, 398 bp, Mus musculus
  source 1..398: mol_type = other DNA
gatatgcaaccctatgtggttgcaacccacagggtgagaaccaatctgctaactttcccagactaaagggcaaggtcatcatgacctgccaggacaggtcatcgccacagctctcagccaacagctttgtcctgtgtcattaagcaattaataatggagcagatgcagtctggcttctgtgtctccaccagactcctgctccaaagttcagtcccttagagcagtgcctggcacttacgcacagaatattttgttgtgttaatattgctactaacgttcaaaatacagcctagcatgtaatgatctttttataattatctgttcaatcctggatgccaggggaagaagtccccttcttggggaaacactttcactacacccgccaggggccgctgtag

SEQ ID NO: 51812 - DNA, 284 bp, Mus musculus
  source 1..284: mol_type = other DNA
cagagctctacctcaaggattccctgacacacggtgccagagtgcacactatggactgagccctggggattccactctctgtaatccggactatacacacgatggtttgtaacagctctttcgtggccaccaagctgaggcttcaactgaccagagaagctagcttaaagctaaactttgctttctgctttagagaactctcctgccttgagagcttccgccaggctgagcgaaggagcgctctggaggcccaggcccttcctgcagcagagttggggtccaca

SEQ ID NO: 51813 - DNA, 312 bp, Mus musculus
  source 1..312: mol_type = other DNA
tatcacaatctattataatgactttttgaaggtaggaaattgcattttatttctatacatgacatacagtaggtgccgagtacttgtttacttatggatacaggcagaacactgccagtctcttgtgtgtctagggcctggctactggcagtcattgtcggaaggagggagagcctccctgcggctcctctctcaattaggaataagggttgtgggaccagagatgggacctcccgctcgccagggcccttctaagaggacagctggaggaaagggtgcggggagcccctgttgcttctccgagggggggcg

SEQ ID NO: 51814 - DNA, 471 bp, Mus musculus
  source 1..471: mol_type = other DNA
aatgcatgggcaagtgagtccctgatacatgtgcacgcacatgcatacagcacacaagtaaatatgaataattatattaattactctctctctttagccctggctgtcctggaactcactctgtagaccaggctggcctcaaactcagaaatctgcctgcctcagaccaggtctcaatataaatttagagactaagcttgggtagaaagataaatttcagtctataccatggagagaaagatagcagcctttgttcaaagtcagttttctattttgaaaaacgcagctggctgctgaggcaagacagcatccagcagggcgccgatgcattctaacatctgcaagctctgtagagggtgcaccgcacactgaggttctgcagctctgaggtctgagacctccatcctcaacccaggccggagcgccgggcgcgccagctcgcgggaagtggcgcgttgtcctggcaaccct

SEQ ID NO: 51815 - DNA, 287 bp, Mus musculus
  source 1..287: mol_type = other DNA
gtttcccagggaaaagctgctccctctttcttaattagtgactgatggggaaggcccaccccatcccatcgataatggattatgatcttgaagtataagcgctttttggtcagggtatttcattgcagcaatagaaagtagccggtttatgcagaaaagttttttaaaaatacactttttaaacaattgaatgaataaatgaatgccagagactccctgcctacgcaagcagcaaacagggggattccggaggggcggggctctacccggaagctcggccacttctt

SEQ ID NO: 51816 - DNA, 473 bp, Mus musculus
  source 1..473: mol_type = other DNA
cctcttagggccacgcgtggagggtcgttcaaccctggcccacggtaggcagacttggggaaaatttcttcccagggtaagaagacactgcccccgccgcagcaggggaggtggagcctacgcagcaccaccgctgctgatccttccgccgcaggaggcccgtgcccctcccctcggggaaagcggctcccagcctgaagctgtgctagttggacaaggaatttatcatcctttctggaaatggcagccgagttggccacctccattcctcatcttgaggggggacatgtcctactcctgcagaaatgggccttgactcaggaaccaggcccggggtcccgctcctccccgccccctccacgatctgctaccatgacgtcaaggtgggcgggcggcggcaggtgcgtggcccgcagccactcctttaaggcggagggatccaagggcggggcccgggctgtgcttcgccttag

SEQ ID NO: 51817 - DNA, 224 bp, Mus musculus
  source 1..224: mol_type = other DNA
ctgcctgagcctgagccaggaccccttcctggggaacgcccaggtacacaggactagcccactggtgctgttatcccttcaaagccactgtcagacacgggaagccacagttattcctggcagctcgtagaggctggctccagcagaggctggctccagcagaggctggctccagcagaggctggagcgaagggaaggccctccctgccacagtcttaaactgc

SEQ ID NO: 51818 - DNA, 242 bp, Mus musculus
  source 1..242: mol_type = other DNA
tgcttagcgcttataagcactaagctaaaggcataaacaactaaatatgtggttatacatcattgtttaaaaatcgaggccagcctgggatacagcgtgagttccaggacatccagggctacacagagaactgggtctcagatactcaaaatcctagtgggagtcccaactggagttccccaggggaaccgggcttggtctgcctccgggccgcgtggggtcgctgtggccgggaagagcgc

SEQ ID NO: 51819 - DNA, 205 bp, Mus musculus
  source 1..205: mol_type = other DNA
tctagaatgatcggtacattgagtattgattgaaatgataccagaggccctgaactgctatcagatctcatgtgtatacttgtccaagcctaagccagttttatgatggaagagttaactatctaatagaaacctgagtcctatagcagtgctacttgcctggcggacccacagagacagcaggagccttctgcctccttctgga

SEQ ID NO: 51820 - DNA, 346 bp, Mus musculus
  source 1..346: mol_type = other DNA
catcagtagggagtgctactgtagggggtccctcctcctttgtaccccagcgggggggggggggggaaggacctcagggctgtcctcttatgccttcataaaggagccttcaaggcaatgggttccagaacgcaaatctgaggtatcccagagggcctgtctggggtacgcagtggggggcccgtgcccccctcccaggctcgcgtgtccgggtgacaggccatcgaagccagcagccctggcggccctaggcgtagggtctctgacctgggggcggggctgtcgccgggaggaggtggctcccacgggcccggggcggacccagcagagggcgggtttgaaagcg

SEQ ID NO: 51821 - DNA, 306 bp, Mus musculus
  source 1..306: mol_type = other DNA
accttgaagaaataaaatcacctcaaaacttcacttctagtcaaggacgccatacacataaaaagaaatatatttttaaaaatgtactttctcactccccagctgagcgagcacttttgtgtacgcatgcgtgggcttctctgaataatttgattatgattgtcacaccagtccctccagcagtgacttctgctgtagaggatcctcaatcaagttggggatcccatacaggttcgcgggacatctgagctgagctgccccctacagagtcctcagaaactagagcatgtgcgacctgtgcggcca

SEQ ID NO: 51822 - DNA, 369 bp, Mus musculus
  source 1..369: mol_type = other DNA
tacacccaaccagatatagctggatatatatacaaatatatgtgtatgtatgtatacacacatatgtacatgtgtatgtatatatacttaaaatacatacataaaaacatatgtgtatatgtatatatatatatgtatatatatcctttagaagataactgtgctcagttaaaacaggggcccatcagagactccgcaggtcacggttggaggtaagctgaacacagcttagcttcatctgaggacctgaggtgactggatccagacgcttcaggtcaagtacagctcaacgctgaagtctgctaagatggcaagtccgccccgctccacacccaagctgagcagagctgggtggaggctggctgaatc

SEQ ID NO: 51823 - DNA, 435 bp, Mus musculus
  source 1..435: mol_type = other DNA
tacacccaaccagatatagctggatatatatacaaatatatgtgtatgtatgtatacacacatatgtacatgtgtatgtatatatacttaaaatacatacataaaaacatatgtgtatatgtatatatatatatgtatatatatcctttagaagataactgtgctcagttaaaacaggggcccatcagagactccgcaggtcacggttggaggtaagctgaacacagcttagcttcatctgaggacctgaggtgactggatccagacgcttcaggtcaagtacagctcaacgctgaagtctgctaagatggcaagtccgccccgctccacacccaagctgagcagagctgggtggaggctggctgaatcttctgagcagttctgactggtgagagctgccactggccggttagaactggggttctggaaaaggcc

SEQ ID NO: 51824 - DNA, 204 bp, Mus musculus
  source 1..204: mol_type = other DNA
tcaggcccgagccaggggttgaccccggggggattttttgtttttgtttttgttttcatttaaaataaaaacaaaagctgtgagtttgcttctggtaatttatgtccataatctcaagtaattacttctagaaatcatagccccaaactccctgcattggagagttctgggcgggggaggggtggtctctgctcctcgctcccc

SEQ ID NO: 51825 - DNA, 353 bp, Mus musculus
  source 1..353: mol_type = other DNA
ctgcgtacagcgggaagcagtatttcttctgtcccctttaagacctcgaaatttaacaggtggtattccaggtgggcgcatcgggggcgcgtgggaggcgcggaccccgaagcctcagatctgaggcctcgcgaagagtgagcacccttctcacttgacactgggtttccagtaaggcctgcgaggggtgcgaggtgttcccctgagcccccaccgcggacccccgcttggcaaggccccgccccgcacgctgcgcctgcgcgccaggggttctccgtgagtgcgcgcgcactttctacgtgtgcggcgtgggggcgggtcctgcgggagcccctccccggccctccctccct

SEQ ID NO: 51826 - DNA, 637 bp, Mus musculus
  source 1..637: mol_type = other DNA
ccaacgcaggcccgggcggctcatgaatgaactgctgtgtggggcgcaggagaggacatgctccccgggccggccgccctctccagcccgcagatcagtccccaccagggttggggcagctactcgtctggttgcttgaggccggcgggggcggaggcgggtggttcccttcagcggcgccggcggctggggagcagctgggaccggaggagggccgcgcaggggccgcacacctggacgagtggcactcgagggccgggacgcaggggtcccacgccttggaatattcctgaggggcgggggtcggcgcacatctggagccccgacaggggtgtgcctccgttgggtcccgtggggcccgggcacctctgggtcccgcaggaggctggggaggggtccgcgtactcacccctaggcgcagactcggctccgactcgggagccccggctccgggcggggcggggctggggagggggagggggagtcgccgggcggctagagctctgggctcctgcggcggccgcggcagcgcgtgggggaggggagggagggagggccggggaggggctcccgcaggacccgcccccacgccgcacacgtagaaagtgcgcgcgcactcacggagaacccctggcgc

SEQ ID NO: 51827 - DNA, 407 bp, Mus musculus
  source 1..407: mol_type = other DNA
aaatggataacctgttttatatttaaaaattatatagaagatcctttttcacttaaaaactacatttatttatttatttgatttttctatgtcagggtttctctgctcaaatcctttaaagatgtataattttataggtatgctgacaattatagtcagtgttcaagaaaggactgtgattcagggctcacagtgttgttctgggtcacaaaatgtgcgggccctccccatcaaaacactctttaaaatggtgtatgtcctcagaaggtcaggaaacactttcctgtgtctcttctaagctgagagaagactgagaccactcttcctgcctgagcacgggaaaccagctgttttactctgcaaaccagaggattaagcactttggtaacaaagtgggtcacagactt

SEQ ID NO: 51828 - DNA, 242 bp, Mus musculus
  source 1..242: mol_type = other DNA
tctttcaaacagacagacagacagacagacagacagacggacagacatgccaataataatggccgtccttttagaagagcagcctaatcccagtgcttaggaagtagaaccagtgattcggggttacaaatggcaggtttgagaccaagtctgggccatttgagaccctgtctccagagaagccgaggcttcttctttccaggcacatcattgcctcgagcatgaagctccctgggaaagag

SEQ ID NO: 51829 - DNA, 526 bp, Mus musculus
  source 1..526: mol_type = other DNA
tcctgaccttcccgggcccattagggcctgaagcagggccacacatgctgcagccagagggccaggcttgtctgcagccctccccgtcaagcagtgcattacttaactgattcaaagtcccaggcagcctagggagactcaattagtactctacactgtcaatctggtgagtcttgggggacccccaaggcaaacccaggcccggaacagacagggggcagctttgtatacaacaaagcaggtgccctgggtttggtgagccagtgcgctcccagcccaaaggctagcttcgctatcaggccccagggggtgtgtcctcggccacaacgcgacgcgggcaggcagcgtggcggggactctggccgacagcctcccgcgcggtccggagcagctgacccgctggcgatcggccaagttgcggcgggccgggaggcagcaacgtgcggcgcggcatgtcgcgggcccggagacagggagctgtgggggcggaccggcgcgccgcctcccccctccgggccccggccca

SEQ ID NO: 51830 - DNA, 378 bp, Mus musculus
  source 1..378: mol_type = other DNA
caaagtaattatctgagcaaattagacacttatttctctctcttggcttggaggcccagggcatgagactccagaacagcagcggagtggttagactcgcctgagttaggctagcctagggaatacagagctgatcctctgtggctactatttgggtctgaacagctgtggagcccaaagttatgtagctgacacacatgttttttttttttaaagagactatgaagctctacacacgtggctagctgcgaccttttatgtagaccaggttggccctgaactggtgtgggccaccacccctgggagatttgtcagactagtcctgggagtaaacaaagagctctcagtccgtatggctgagtctacactgtactgtga

SEQ ID NO: 51831 - DNA, 265 bp, Mus musculus
  source 1..265: mol_type = other DNA
gccacaaatttggtgccaaattctctccagagaagcctctctggaaacttcccagaggatctagagttatgcttccgaggtcaaacacgcaactttttgggtgtgtgtgtatgtcagaaacacgcaattatttgtgaggaattgttcttagatactctgggattcccagtgtgttcctgagcccagtttgagctccccgaaaggcggtgcctggctccaccagaccgctccccggggcgggtctgggcggggcttgggggtccac

SEQ ID NO: 51832 - DNA, 323 bp, Mus musculus
  source 1..323: mol_type = other DNA
tttgacaccaaaagaggctaaagccttttctccgcagagaggtagggatgccctgggcttcccaggatgcagggtgactagggtggcccactgtaggaatcccatttgtatataaacacgtgtctgaagacagctacagtgtaattagatataataatatctttggcaagcaatgatggctcacaaccatctgtacagcttactcatatacattaaataactagctaactaactaaataaataaatcttttagaaaagaccacctctgatgctgagggccagagtccgcacagcggctgcgcacacccctgctccggaagcgg

SEQ ID NO: 51833 - DNA, 305 bp, Mus musculus
  source 1..305: mol_type = other DNA
tgagatcaagttcaaacttcacttgggaattcctgtcatgcctggaactcaggaactctgcctcctgagttcctgctaaaaaccttaactctttatagtattataagggtctatgacggcgccttccaggacagccaggactatacagagaaacccttatgtaaacacaaagagtgttttattctgcagaagtccaacatgctggagtctcagtttacttacccagccccaggggacgactgggtcgcctaagtgggaggggggactgagtccctttggctggtaagagccggaagtggagctta

SEQ ID NO: 51834 - DNA, 320 bp, Mus musculus
  source 1..320: mol_type = other DNA
tttatgtcgctctgagagttctgaggttgacgtaactggaaccccagctccgccccaagtaggggccaggcccctcctcctctgttttagtaggcaccctccaaaccttaggcagctggctgctttatgggtcctggacacagcggtgcctggggctgctaaaaccaaccccagtgactatattgcaagggtggcataatcatcgtcacaataacagctctaattatgcggtggagccagcaggctgtcagatccaacaaggcgcgcttgctgccctcggggaattgtagttcgaactcgcattctttagcaaaggcagg

SEQ ID NO: 51835 - DNA, 368 bp, Mus musculus
  source 1..368: mol_type = other DNA
taagagatgatacagccttaagtctttatgtattggcaaagtctgcacaatgccaaaacgtaaaagactgtctcactttgcagctcagtctggcctcaaactggtcaagaaaaactctttctacaagaaaactctccttagagacactcttactgcgggctccgggcggagtccaatgacagcgtctagatgtcgtcgtcgtcagcaccgcgcgcgccgcgagggacggttgacgcgcctgcgcaccgcggaacttccgttccccagccccgccccgccaggcgcggccgtcacccgaagcggccacttccgcgcgcgcatgcgccgtggcggctccggcgcatgcgcagcgctgggttcttcccagc

SEQ ID NO: 51836 - DNA, 444 bp, Mus musculus
  source 1..444: mol_type = other DNA
cttctgcagcagctgcatcagcatctacttcttcctcccgcaggcgctggtgcagcggagagtgaggggcccttccattgcatcagtagttgcaaatttagggggtgccagtggatcctagcctccagcccccacagagagccgaggcccgcgggagccccccgggaaggggacaggctgcgtttcagcggagccgaacagcagccaccgtccggacgccgccagcccggggctgctggcagcaggcgcgctccacatttcggacgccgctggccggcgccgccggagtcgccatgtccctcgaggcttcccgtcgctggagcacgcgcgcgtgggaagagcgtgcgacccgggtccggcctggccccacttgacgtccggaagtgaaggacgtaagatctcgcgacattcaagattgcgggagcccgagcgttgctgcggaga

SEQ ID NO: 51837 - DNA, 414 bp, Mus musculus
  source 1..414: mol_type = other DNA
gcacgtgcgctcccggaacgccagggaatgtggggtttgccccggcgtcagagccggcacagcctgcgtgggtggagactgggtgagggccgcgaccagaagccaccctccccacgggcagtgggggttctcggggcaggcccaggccgccaggaccccagctaccttgagggcttccagccggtagcgctgggtagagctggggtccatcatgaccgtcagagccgggaaccccaccggcgtcccgggagcacgaggttacgcacagttcccctggcgggaccccgggccgcggcggctgggaagaacccagcgctgcgcatgcgccggagccgccacggcgcatgcgcgcgcggaagtggccgcttcgggtgacggccgcgcctggcggggcggggctggggaacggaagtt

SEQ ID NO: 51838 - DNA, 328 bp, Mus musculus
  source 1..328: mol_type = other DNA
gctatcaagattgcaaaatgttatcagtctactcaaaaattcgcctttaatcccagtgcaaaacagtttcaaagtgaattttaaaaaaatcatatataatgaagctccactactcaacttttattcatagttcaaagcttaattcagctggattcagtgcatcaatgattccctgcgaggtctggcccctcgggccgactgggcacctgtgtggccacgctgtaaaaggaggcgagtccgcgcctgcgtctccgcagcaacgctcgggctcccgcaatcttgaatgtcgcgagatcttacgtccttcacttccggacgtcaagtgggg

SEQ ID NO: 51839 - DNA, 382 bp, Mus musculus
  source 1..382: mol_type = other DNA
acaggctcctgcatgcacaaactcataaataattatggtacaggatatctgttataaagttcggtgtaactagttagagccgtctagtaaaaggagcttcaaagagaaggctttttggaagcgttgacagtttaagaatggcatacatgaatttgaagtcagcctgggctgctcctgagtggaggaactggattgcagatctcaaggcttgattttctgataacacaagcctgaagtcagaagccagaggctctctgtgagttcaaggtacaaagtgagttcacattccaaggccagccaatgaggcctgacaggtctgcaaaggaggagaccgcccccaggcccgcccctccgatgacgcacggcgcccggtgcgtgggga

SEQ ID NO: 51840 - DNA, 425 bp, Mus musculus
  source 1..425: mol_type = other DNA
ctccctcacctcctcactctgtgtttcttacagagagagagagagagagagagaggatgctttcatcttgaaatcctcatattttgggatcctttagacttcaaaaaggtgacttactagtcatgttgtgctagcataccagccttacattttcatgctctgggtttgcaatttttgctaaaagaaaacaacaacctcggtgactcaaacccagagagtgccccccctggggggggcagggcactgccctgtccctcgagtcaccttccaacttaaagataggaagttaaacaccaacaaatacacatattggggtctttatcttctttgggtttttttgactcattggctctgaggggtaaagagacctacaagggcatacaaaactctcattccgagatgtggattatgtagatatggtccat

SEQ ID NO: 51841 - DNA, 356 bp, Mus musculus
  source 1..356: mol_type = other DNA
aaacaccaacaaatacacatattggggtctttatcttctttgggtttttttgactcattggctctgaggggtaaagagacctacaagggcatacaaaactctcattccgagatgtggattatgtagatatggtccatagcagggcgcgcaccttcggcccgcgctttactcctttgattttctaatttcggaggaagaaagcggcagcgcgaggtgtggccgtgcgcagcgggggtgggcgcggggcgcagtcggtgcggggcgggccgcggcggcgggaggggagaggcgggctccgccggcacacgccgcccctggcagggggccgagcgcgcgcgaggagccgctgccgccgc

SEQ ID NO: 51842 - DNA, 466 bp, Mus musculus
  source 1..466: mol_type = other DNA
ttttaaagtttatatgtatgtgtgtgcaggtgcttacagagaccaagaaggccttggatcctggagctgagccttcttacacgggtgctggaaatcaaatccaggtcctgtgcaagagcagcttcttaatctttgagccacagctttagacataaacattttaaggccttgacataaacattttaaattatacaaatttcacaatacttgggttggtattatcatctcaatcgaaaaaactttcaagatcttgtagccttaggatacagctcatttcgggacagctccccgaggcagagctgtacgcacgcgcagaggctggcacgcgttagagcatccttaccccctaacaggtcttcctgcctgggtggcgcagcaatctagaaactggcctgccccggggacagcgacttcctctccagccccgcgaggggcggtcccgcctagggggcggggattcagcggg

SEQ ID NO: 51843 - DNA, 252 bp, Mus musculus
  source 1..252: mol_type = other DNA
ttggtgacttttttaaagatttatttattgttatatgtaagtatactgtagctgtcttcagacacaccagaagagcagttggtgctcttaaactaagttagaaattagaccgggatgtgagttctatatatatgccactgcctgttccatggagactgttaccatgttactacttccagtcttttcttgcttctcactgaccagagaggccattgaactcagggcactttgaagttctttaaagtaagttga

SEQ ID NO: 51844 - DNA, 448 bp, Mus musculus
  source 1..448: mol_type = other DNA
agaaaaaagacctccggagccatctccaaaacacttgccaggcctgtcacggtatgctagaacatctggaaatttaaacctctataagttattggactggaacgctccaggagcctgggaaccaagctactgaggcctcccactcaccgggctctccggccccgcccaccgcgccgggaggaggagaggggtggtctcgtgggcggctcgccggtcgccattttgcgcggggccgaaaggcggggcctgcgcacttcagggcgcgcgcccctggtgctcgcgcaggctcagcgctccgccccacggctcccggctcctgaggccgctctccgcgtccagccgcgggagagcctgggaggacgagggggtgtggcgtgtcggcgcgtacccgcgccctccaaccgctggccggtggggcggggccgcggggagggggccgctccgtccg

SEQ ID NO: 51845 - DNA, 326 bp, Mus musculus
  source 1..326: mol_type = other DNA
caaccctgggaaacgtcatccaggatgctcttaaagaggcagactggactgcagatgaggagtgtctgaaagatagctacagtgtatttacatataataaataaataaatctttttaaaaaaaaaaaaaagagtctcagaggtcacctcagaggtcacttaggttggctacccaaggggagtccagccctcatcctgagtcctgggctgtgagtcggagcacactatacccaggggacctgtttaggtctagccagagtacaccaggacctctgaggaatggtggcctcccaggtctgggccagcctctgggggcgattctggcct

SEQ ID NO: 51846 - DNA, 246 bp, Mus musculus
  source 1..246: mol_type = other DNA
gtctgtttcccccgagctgggtctggagacacccaccacagctcctttaactctggtgctaggaaccaaattcgggttaagcagtgatctttctttctaagatacttataaagattacaaaagttaatgtgtctggcaggtgtacctgctgctattattattgttgttgaagatgctccctctacattcgtggagagtatactctgagaatattgagtaatccccactcagagagtagcggcgcag

SEQ ID NO: 51847 - DNA, 347 bp, Mus musculus
  source 1..347: mol_type = other DNA
taacagcactggccactctccagaggacctaactccatgtcttagttaggcttttttataaaaaacaacatttaattgggtctggcaggcaggcatggcacaggcattgccatcttcatccaaaggctgctagtggaagactgcctatttgaacaaggcataaaataataaaataatcaaagataataattattttaaataataaataaaaatgaagttgtgattaaaacactacatacatgtatgaataataaaatatttttaaaataagttaacaatcttttttaaattttggaaagattaatgagagccaatcggtccccttacctctgggagtcgctttccca

SEQ ID NO: 51848 - DNA, 407 bp, Mus musculus
  source 1..407: mol_type = other DNA
cctgtcgccatgtccctgggctctggctgaagccagctgctgctggaccagtacctggagtacgcggagccgccagggtcctgcagcttcctttgtgccacttgctggtacatgtggaagcccctcctgggccttagaggccagagtgtctgccctcttgtttccagaacaggttcggaacctcacccagtgctggctgagtgtacacaagcaggcattcccttgttggccgcagcctggagggcctcagactttgtccaacgcttgcaaagcgcgggctcagagctgttcgggccgcgggcagccttcactctggctctgcgcagtggcttctccggagctctgctgcagcagtccttcctcacggctgctcacgtgagtcctgccaagctccaggccccagctgt

SEQ ID NO: 51849 - DNA, 236 bp, Mus musculus
  source 1..236: mol_type = other DNA
ttgggactcaggtctgtaactgcccaccaggaatagtggaccttctgtacagagctttcttttgtattaaaaaaatactctttcaataaatgtatcatttttgtgcacagacttggactgttctttacttaaaagtcatgggagtatggagcgcaggatgcttcacacccacgctcgcagtgggccaccgtaggacccgtagtcgcccgggtcgtgcgtgcgcccggcgtgtgacc

SEQ ID NO: 51850 - DNA, 267 bp, Mus musculus
  source 1..267: mol_type = other DNA
aacaagatattttctctagcttggagcaaagattcagactctcagacccttaacctgggcctgtgcttagagcccccatcatggatgggaggatgttgtgtgtctgccaaagatacccctcccccaggggggcggaactggttcggctgtgtccccttcgggccaatggggagcctaggtgccggaagcgcggaccaatggggcgggggcgctggggctcgccatataaggagcggcctcgccataaaaggaaacattgtatctctt

SEQ ID NO: 51851 - DNA, 429 bp, Mus musculus
  source 1..429: mol_type = other DNA
catgtggcaggaccctggagtcctggcgccacttctcttccttcccccctcccagctgcttgggggaagggaggtctaagcaggcctggggggccctccagagccagaagggggacaaggcagcagctggggcccatcttctaaagcccttgctgctttcacaacaaagaaagaatgtgtgcgttgggcctccccacagctggagatttggccatgccctgagcccagggaccacagcttctgtctcatgcagcactttgggttgcttaactccagcaacttggagaattctgggcaaactattgctccagatcagagggcctaacggagttctgagagtcactttggttgccagctcctcccctcgacggcggggaagggggcgtcagggggcggggctcgggggcgtggcttggctgcggcggcggc

SEQ ID NO: 51852 - DNA, 366 bp, Mus musculus
  source 1..366: mol_type = other DNA
ggttgctcgggtcacgtgacgggcggcagtccccgcccctttagccggaccggcagactgcagggggctgagaattaagattacactgactcttattcccacattccgggacaatctgatgtcgggtcccgggctcaccctcggccctcggggcgaggcaggaacgaactgtgggccctcaggcttcggtagcctgcgctcggagccttgctccgtgaccccactgtgctcagcagatctgctatgcatccctgaaccaacaattgccgtaatcctgttgggaatcctaaccgggtctcccttctcagccgtgccaggtcctctgagaggctgtgaggtgtggactttgggcagtacaaagccttc

SEQ ID NO: 51853 - DNA, 205 bp, Mus musculus
  source 1..205: mol_type = other DNA
agccatatcaggctggagatgcccttcccagccaggccgggccatccgtgtctgtaaccccagcaggttgaaccaccaggttggaactggcttttaatcccatctgtgcagtgccaggtcagccaagagtgttcccaacactgccctgcggagtcatggcgggtcggcccaaggtcctatccagttctggctttggaggcacttc

SEQ ID NO: 51854 - DNA, 345 bp, Mus musculus
  source 1..345: mol_type = other DNA
ctgagaagggagacccggttaggattcccaacaggattacggcaattgttggttcagggatgcatagcagatctgctgagcacagtggggtcacggagcaaggctccgagcgcaggctaccgaagcctgagggcccacagttcgttcctgcctcgccccgagggccgagggtgagcccgggacccgacatcagattgtcccggaatgtgggaataagagtcagtgtaatcttaattctcagccccctgcagtctgccggtccggctaaaggggcggggactgccgcccgtcacgtgacccgagcaacccccccgcctctctcgcgtcattggaaagcgacgggac

SEQ ID NO: 51855 - DNA, 350 bp, Mus musculus
  source 1..350: mol_type = other DNA
gtgttcccaacactgccctgcggagtcatggcgggtcggcccaaggtcctatccagttctggctttggaggcacttccaggactggagggctgcgtcgtccaggtggcacccgctactccgcccgctgatggcccccggcccccagctttccgctaaatcaggcggaagcgagcggtggctggagcaggcggcggagcctcggagcgcctggagcaccagccaggactaggctccaccctgcagcaggcagtgcgccggcgcgcctcggaggcctctgctggtcacgccctctgcccgcctgtctcctgcagaggcacgccccctcctctgcgcctagaccccttcaggg

SEQ ID NO: 51856 - DNA, 273 bp, Mus musculus
  source 1..273: mol_type = other DNA
ggaagatacgctcagggcccatggctccctgctgccatccgggcaggggctgcaggggggggagtgccggacccgcaccttcacttccggcggggcaggacatgctggggctcttagtcctccagccccgccccgtgcccgagactgacgcaagcgaggacaagtccgcctcttgccccaactggtgttctgcgcatgcgctcgtggactacaagtccctgaagctgtcgggccggcaattctcactgcacgtgcgcgtcccgctgcccgccg

SEQ ID NO: 51857 - DNA, 319 bp, Mus musculus
  source 1..319: mol_type = other DNA
taggagggcatttccctccctccttgggccgagggccccttccctctgccccagtctggctgggtagccaggctcagcagtgttggagcctcaggagcctcccctccctgcttgagcatcgcccgggagctgaccctccccaacccgcggtggtggggaccccttgagctgttgctagcaggaggcaaaggggccacccttgctgcctggcagcctctccgcagacgtgaagttctacggctgcggggcggtgcttctggcagaaccctcagcacattggctcaggcttccggaaagggtgggacgtgggacctcgtcg

SEQ ID NO: 51858 - DNA, 226 bp, Mus musculus
  source 1..226: mol_type = other DNA
gtacgagtagcctgctgggcctgctggaagatacgctcagggcccatggctccctgctgccatccgggcaggggctgcaggggggggagtgccggacccgcaccttcacttccggcggggcaggacatgctggggctcttagtcctccagccccgccccgtgcccgagactgacgcaagcgaggacaagtccgcctcttgccccaactggtgttctgcgcatgcgc

SEQ ID NO: 51859 - DNA, 318 bp, Mus musculus
  source 1..318: mol_type = other DNA
agacccgcgcggccccagccgtaggcaatgggcgtcgcctaacccatcccaggctacctgccaggccgggccggggtggggccgcgggtcctcgcgctgccagcagcctagaacccgttgcccgccaaccgattcctcgggacttcgtccttccggcgggcagcgggacgcgcacgtgcagtgagaattgccggcccgacagcttcagggacttgtagtccacgagcgcatgcgcagaacaccagttggggcaagaggcggacttgtcctcgcttgcgtcagtctcgggcacggggcggggctggaggactaagagcc

SEQ ID NO: 51860 - DNA, 306 bp, Mus musculus
  source 1..306: mol_type = other DNA
ttcaagcttcaagttcccatgcattaattcagccagcagccgctgcataaatagattggcataagcatggctggggcagtttggaaaactaagacatcctcaggaaaatggactttttccaaaagaattttatgtaagtccgtacactgtagctgtcttcagacaccccagaagagggcatcagatctcattacggatgaggatttgaacttggaagatcactctgtagacaggctggcctggcgcgtgcgtcgacaacaacggaggcggtcgtcaagccaggctccccccaggggccgacttggc

SEQ ID NO: 51861 - DNA, 303 bp, Mus musculus
  source 1..303: mol_type = other DNA
ccagggttcaccctgcattgggaaggcgaagggagggcgggctccctgtcgagtcacaggccgactttagcccggctgggatcttgcctcaggttatacagtgacgctagcccgagcgggcgccagttcccatggaaagcagatggaaggatctccactcttcccgacactgtcttactaagccaggtccaggattgctgtgctgagccatcctcaaggcagaggcagcaagcctggctctgggcccagggcccagcaggggcgtgtccctgctctcacctgccattggccaggtgggactgc

SEQ ID NO: 51862 - DNA, 328 bp, Mus musculus
  source 1..328: mol_type = other DNA
gatcatcctgcctagaggtggggttacaggggcaaacccatcacacctactcagataactaaaatatatttaacccagtccgatgaggctgctttttcccagcagctacagggaccttgaagctgcagcaaaccagggtctaggacagacttgatgaatgcccgggagtagcaatttgagtttaaattcctgtgaagaaaggtgcccttttcgtgttagggcctttttcctccagtccgtacgaagcaggggagaacagatctgctagccaagctcggggcccgaccctgtactctttctttccaatgagaaaaaagggaagctgagc

SEQ ID NO: 51863 - DNA, 423 bp, Mus musculus
  source 1..423: mol_type = other DNA
cagccctggctgtcctggaactcactttgtagaccaggctggcctcgaactcagaaatctgcctgctcactcttatctgtttattaatctagttttcataaggagaaatgactaaagagggccaccattaagccttaaggatccaagtttgaggtggtggaaggaggcaaccccaaaataaatatataaagacttttttattaacaccttaatacgaggcccggtggggccggcctggtccacgctggttcatccagatgaaggtttaggaactgatgctccagctactgagcctcctgccgagcgaacccattggttgcgtcgcccgcgggccttggtcggtttcgcaagccgctagaggctaccgggcgtggggcgggccggagctcgccgttgccgtggttacccagaggcacgtgcgca

SEQ ID NO: 51864 - DNA, 459 bp, Mus musculus
  source 1..459: mol_type = other DNA
atgctttagacacacatatttaaaaacaagtgtgtgtgtgtgtgttattcacagagatctatttgaaaaatagattagccaatgaactaattgatttaattaaattaaaaatgaaaagctttgagaggcaggcggacttctgagttcgaggccagcctggtctacagagtgagttccaggacagccagggctacaggaagagctgcacgtggagtcccgccatcccatccctgtccagtggatggcaattgctctcaagtagagcggctttgagaatctgaggttgcactcacagaggagcctctggggcctatgaagtgggtgggcacccagcccctgggatgggagtgggacctgagttccctggcacccctcctccccagaaagcactgggaactagggggtagagcgtgtagtaggggagccttctgccctagcccacacctcagagctgcagct

SEQ ID NO: 51865 - DNA, 350 bp, Mus musculus
  source 1..350: mol_type = other DNA
gtactcaacaattccttgcagagtcccactgtagatagtggcgttgtcctaggctagagcataaaacagcactgtgctagcataaaacagcactgtgctagtatgtcccaacttgtgctaaggctttgtaaatcttaaggagccccctggcggccactgggaacccgcaacttctgtagagcccgtgccgtagcggaagctgcagatgcagtggaaagcctttaaattgttcacaattttttgccggacctggctagcgctaaggaatctcaggctgcctgagtcctcctgcgggagcgagagtccgtctctatgatacaagagacgtcgaggcgggcctctctaccccg

SEQ ID NO: 51866 - DNA, 292 bp, Mus musculus
  source 1..292: mol_type = other DNA
ataataggattcttcatttgaatagccatgttgaagtaaagaaataatatatactgtataggcctaaagatacatcataattggacagctaatgcttgtaatcaggacatccttctgcctctgctgtaacaaatcatgtgtgcaggaacattggtgccaatgtgacagcttcagtagccaacagcttcagtggattttcttctagagtagagaaagtgtccttccccgtggcaggagggaattgaacagagaaaaatctctccttaacaactgctccagaactcttggccct

SEQ ID NO: 51867 - DNA, 355 bp, Mus musculus
  source 1..355: mol_type = other DNA
gcgaggcgctccggctgagggtcttagccccgcgcggccagcggttgccagctgcgcagggagtggctgccaccgcgtcagggagcaagacggtgggggtggcatgtcatcctcccccgccccccctcggccattaaaaaaaataatctgtttttagactccccagacgcccccaggccgcgccgagctgcagtggatggggcaagcggttccctggccagctgttccagctgcagcttcctccggggccaccctgcagcagatctccggcctgtaagggggtagcatgtgcagctgccgctgctgctcacagcgcgcgttggtgggaggcctcgcgcggagagcgagcgctcgg

SEQ ID NO: 51868 - DNA, 189 bp, Mus musculus
  source 1..189: mol_type = other DNA
aggcaccagccctgggtttctctgtgtagccctggctggcctggaactcctttgtagaccaggctggcctggaactcagatatgcctgtattgggtatcagatcccctagaactgagtctgaactctctgtaagagcagtcagtgctcttagctgggtccagcatgtatatacacggagactcctcctg

SEQ ID NO: 51869 - DNA, 405 bp, Mus musculus
  source 1..405: mol_type = other DNA
ctaatcttctccacgaagataatttaaaagatattcaaatacatgtcctgtcagtatagtcttaaagcaatgcagctaaaaaaaaaaaaatatccagtatttcttctgttgctttgttttttttttttttccttgaccttttgagaaactgcaaaaaacaatggcagtcgcagctctagccctggctctccctccgcgcagccgcaggagtaggcaggctggacgcggaagtaagcgcgtgcttccaggaaaggatatatatcaatcaatggtcataaattaaatgtcttgcaattgtaccttaaaactttgataccagacttttgacagacagctgtgtgtctatcgcgccaggaatgattattcttggtgctggggacctggccgctcaggggacgactacag

SEQ ID NO: 51870 - DNA, 553 bp, Mus musculus
  source 1..553: mol_type = other DNA
caaccaatgccgagcagccccgggcggccccccggcggcgggccctcctccccggcaccacgttccacagtcatggcgcacggcgaggggcggacgcagggccgcacccgcgccccctcctctcctcccagcggagatggagaccgctccccgcccccaaggggcagaggatggaggcgcgagcttctccagaacgcacccccaggccctagaaagaccgggggatgctggatcttggtatctttgcaaatccttaaataaacaacaataatttgcaacgccgactgcgacgcaggaagcaatcctgcaatgggtccggagtgggaaggcggcagcttcccggccaccaagctgctctcactccaagggggcctcgagtcccccaccccctccggggatccgagtctctgctacactccggggactgacagcaatgcaccgggcggcccgcgcctgccggagcgcggcgccccgggggacaggggcggcgggcgggggccgcggcggagaacccgccgcgctggacacagctctgcggagggatatctctccc

SEQ ID NO: 51871 - DNA, 426 bp, Mus musculus
  source 1..426: mol_type = other DNA
tggatcttggtatctttgcaaatccttaaataaacaacaataatttgcaacgccgactgcgacgcaggaagcaatcctgcaatgggtccggagtgggaaggcggcagcttcccggccaccaagctgctctcactccaagggggcctcgagtcccccaccccctccggggatccgagtctctgctacactccggggactgacagcaatgcaccgggcggcccgcgcctgccggagcgcggcgccccgggggacaggggcggcgggcgggggccgcggcggagaacccgccgcgctggacacagctctgcggagggatatctctcccgcaagaaaataatttgacagtcgatttgctgacagagcgctgctcggccctgagtgggctgcggccgggggaggggcgagagatacatatgtatttctgtc

SEQ ID NO: 51872 - DNA, 542 bp, Mus musculus
  source 1..542: mol_type = other DNA
tgtcacaaattcaggatgacatttatcatgtagcattttaatctgatttgttctcatctctacttggcaagtgaaagaaaaaaaaaatgctaaattgcatgggaaggcattttgaaaaacacaatttagaaaaatccatttcgatggtgtgaacaaagtttccttttgcaataaggtaaaatgttagaatttgtttctgttgtgtttgtctctaagcaaacagaaccacccaagccttaaatgaatgagtgaataataaataagtaaataaataagaaaatagaaaatttaaaatataattttaaaaaaattcaagttcagtgtcggaacacaggagacactctttccttttcgaactctatggttcgcgaacaatgctgtgaccccggaagcggtcctgggcgatcagggcaccaagatggcggcgcgcgcagcgtgtgtggctctgtgccggcgcctgcagcaggtaaaggggtgggcgtggggtcccggctgccgacggcgccgtcatcgtcgagtctcgctcatcctccgttggatct

SEQ ID NO: 51873 - DNA, 246 bp, Mus musculus
  source 1..246: mol_type = other DNA
gactccggtgtcatttgcaaaggttttactgtcatcgatcccagcacgcccgagaggcatcagacgatcccagccagctcaactgccgttctatcaacagcagctggcctcgacctgaattttaagaatgaaaatgctgagggcttaaaccaggaaggtttaaatccagtgggggttcatcaactgcctaaaagactctaagcaagttactttaaaactcatttttgccctctgtgaaaaatgctt

SEQ ID NO: 51874 - DNA, 427 bp, Mus musculus
  source 1..427: mol_type = other DNA
ttgtagcagcaatagaaacccttactaagacatatagagatgtcacaaattcaggatgacatttatcatgtagcattttaatctgatttgttctcatctctacttggcaagtgaaagaaaaaaaaaatgctaaattgcatgggaaggcattttgaaaaacacaatttagaaaaatccatttcgatggtgtgaacaaagtttccttttgcaataaggtaaaatgttagaatttgtttctgttgtgtttgtctctaagcaaacagaaccacccaagccttaaatgaatgagtgaataataaataagtaaataaataagaaaatagaaaatttaaaatataattttaaaaaaattcaagttcagtgtcggaacacaggagacactctttccttttcgaactctatggttcgcgaacaatgctgtgacccc

SEQ ID NO: 51875 - DNA, 384 bp, Mus musculus
  source 1..384: mol_type = other DNA
cacccacatggtgactcacaatgaattaactccagtataaaaataagatctagccaagcatggtcttagtgaattcaaggctagccaaaaatgaaatctaaaagatagcataaatatctactttggttgtttttgttattgggagtgtccccctgtgtcaacagggcaaccccatgagcaatgaatatgtacttgattcagcatgtaataactatgtgcttggtcaacctcttaaagcaaggtcatgtggcctttagtcctgcccgcgggttagtgctcggagagacgcatctgtccttctggtggaccacctgcctctcactggacctgtggaggggcgaggcagaggaagcttagctttctggaggtcagacctccccagga

SEQ ID NO: 51876 - DNA, 301 bp, Mus musculus
  source 1..301: mol_type = other DNA
aaaacaaaaaacaaaaaacaaaaaaaaaggtttttttttttttttttttaataagattctcttttcagagagtgggcagggtctgccctgctgtctcatctgtgacagaaaagtgctgagtgggcagctttgtcactgaaaaccctaccattgggttgctacgtaggtaaccactggagaggcttcatgtgttctttccaggagggaacgcatagtgtcttggaagtacagctggccagctgcacacaagatgcccactgcaatgacgagcagccgctggccggccacccaccagatcctg

SEQ ID NO: 51877 - DNA, 236 bp, Mus musculus
  source 1..236: mol_type = other DNA
ttggaccaggtctgtaacatccctgttagagtacacttagggttctgtcagagacaggcaggcttgcctctttaggtcagggaaaggtgacatcttgttcttgccctggcccccaatgtaatcatttgggtgttgaacagatagggagtgattggtgacacacccctgtctcccacttcccattttcccggggttccccccagttaagagtgtataatcccatagccgagctggtg

SEQ ID NO: 51878 - DNA, 296 bp, Mus musculus
  source 1..296: mol_type = other DNA
ctttttctttttttaaaatatttatttatttattatatacactgtagcaagagggcatcagatgagcagtcggcgctcctaacgactctgtagaccaggctggcctcgaacgagcaatcagtgctcttaaatttctgagaacttacttcatacactctggtctcagctccaaagtgctattccagatcaattgctacagctactgacttaagtgtccaagaaagcttgggtcacacaacgccacgtgagcttgggctatcccgagctcataaggcggggcacccgcggccccgccc

SEQ ID NO: 51879 - DNA, 440 bp, Mus musculus
  source 1..440: mol_type = other DNA
tacacactatataatgtattaaatatattatctttaatatattaataatatacacaatataaataataaacaagaaacaatatgaaatatataaaataattatatattgaatatgttaaatatttaatatattagtatattaatatatatggaggcctagtttcctgtgttctcttgaggccagtctggtgaaaaaaaatgtgcagaaatttcttaactctccctcacacatgtcagagggcccacgggatgctctgggccatgctagcttggccaggcagtcaggaactcgccttgggcttttcctggtccagaaaaaggaacccgcggcagggggcggctctgctccccagcagggcgtgggccgggcgaggtcctccgcgcagcgcacggtgccaagttgggcggcggggcggggccggctccgggcggcagcctct

SEQ ID NO: 51880 - DNA, 184 bp, Mus musculus
  source 1..184: mol_type = other DNA
gacccaattaaatgcttctttttacaagagttggaacccggggttttcttgcaagttaacctgggtgctcctctcggggcaggggtttgaatcctaaggcttgttagccttcaaactctggtctcccccacgtgataactgggggcccaggtgaaataacgggggtgtcagagaccagacccag

SEQ ID NO: 51881 - DNA, 282 bp, Mus musculus
  source 1..282: mol_type = other DNA
cactcatttattgaataaggacaggcacggtcctttacccgccatctttggggcacaaaacagctcacaccaagcacgtgacctggttgctcaggctgaggtgagcgacctcacatgggctggggacaacaccagtacgaagtggaacccctgtggggcccctgggcctccccctggaagagaggccacttcagagctgctctctgctgctgagcacctctgacatggctgagaagagccctcaaagctctctcctctaagtcctgtggcccaagagaggca

SEQ ID NO: 51882 - DNA, 386 bp, Mus musculus
  source 1..386: mol_type = other DNA
caggtgtgcgcacatgctacagaggacagcttatgggagttgctctctcccagggatcacactcaggttgccagacttttaccctctgagccattgaatcggacagaaactgctgaaataacttttggcgcctagttcttggggaagagggcacccttccagaaagttctctctaccctcttggtcagaagggacccgagggcccggaagcgtgcgggccggagcccagcggaccaatggggctgcggggagggagggagggtatagcgcccgccagccctttccgactgccccccttagaacgttgtgacgtaggagcattccacggttgctacatcgtcgcgaggggcggggcgcctgtcagggaagcggtgcgcgcgggtggc

SEQ ID NO: 51883 - DNA, 300 bp, Mus musculus
  source 1..300: mol_type = other DNA
gccaattcctatttctaacctttgggtgctagtagcgacactacaaggcctgctccctttgccaaagaacggcggccccctaagcagtcgttgatcgaccggagcgccgcggcgacacgcccacagggagcgccatctctggtacccagtggtgacatttctagaacgtcatcgactcggctccgcccccaaggcgtccaacggttttctggaaaagggtgacttggacatccacctttctatcccgaagctcttcctgagagaggaacgggggcactgtgatctctcagtggcctcttg

SEQ ID NO: 51884 - DNA, 276 bp, Mus musculus
  source 1..276: mol_type = other DNA
ttttaagtgctgaggccgagtactttaaaattatttttatcaagtgagacttcaaacatgtttaagataaaagtcaatcaaaatttcatctctgtgaattcgagtccagcctgttctacagaggccaattcctatttctaacctttgggtgctagtagcgacactacaaggcctgctccctttgccaaagaacggcggccccctaagcagtcgttgatcgaccggagcgccgcggcgacacgcccacagggagcgccatctctggtacccagtggt

SEQ ID NO: 51885 - DNA, 538 bp, Mus musculus
  source 1..538: mol_type = other DNA
agaccaccaggtggtggtggtacccgcctttacgaggccagcctggtctacaaagtgagttccaggacagccagggctatacagagaaaccctgtctttaactctgaattctggaattcaggagtgtgatggggtgtcagaccggcccaactcacgccagccgcgtggcgcgctctcgcggtggtgctgaccgatcaccagccccatggtcagtccccgcgcgcactgcgttcccagccaggaaatttgggcattttggccgaaaaaattgcccaccaggttcacacgtgtgaagccggctaaaaagccgactgcgcttgcgctgtgtgttccgatcgccaagaggccactgagagatcacagtgcccccgttcctctctcaggaagagcttcgggatagaaaggtggatgtccaagtcacccttttccagaaaaccgttggacgccttgggggcggagccgagtcgatgacgttctagaaatgtcaccactgggtaccagagatggcgctccctgtgggcgtgtcgccgcggcgctc

SEQ ID NO: 51886 - DNA, 502 bp, Mus musculus
  source 1..502: mol_type = other DNA
agtgtgcttagacgtgctgaggtagcctgtgtgcacaggcctcacatccattccagaggaaggcatagttttcgttcacaaaaattgtcctttttttttttttgccagcagttcttaacatataaatgtgtcctctgtacaaatggttatgtgtggaaagccatcttcaggcatgtagagacattaggatcccagtttcactgccagggctgcacccagggaaaaaaaaattgttggatcttaagtttcgagcttgaatgaattttgtctgagacaatccatttgggccaagagtgactgagccatctgcctatactgtcaaggaacttgtgacatggcttgacaggaatacttagatatgagggacccatatgatgaaaggagacagacggctctcacacctgagtaactaaatataattttaaaattacatcttaggattgatttggggaaatataagtttgaatttccagaacatatctaaagtattagacttctaaga

SEQ ID NO: 51887 - DNA, 448 bp, Mus musculus
  source 1..448: mol_type = other DNA
tgtatcaaaattaattaatcagttaattgattaaatttaaagaactgtctttagaataattttaatcctggggaaactttgggtttccaaataatataacgttttaaaaaatatttgttgggtatactgtatttcttttatgaatattaaaaagcaacactatagtgagacttcaggaatcctagcagatcaccactaatttgagattagcctggctacaggatggaagcaagcttgcttcagtttgcggaaatgccattctttctatataaaatgtgctttcttcagaaaggctagcttataaattgctttcaaatacaatgaacttgacctgtacttgaaataccagtttcaactttaaaaagcacaatcttttaattaaaaactattaagtcttgcacagaaataccagttgcaaccttttctttctaggaaaatattttcctta

SEQ ID NO: 51888 - DNA, 440 bp, Mus musculus
  source 1..440: mol_type = other DNA
ctcccaggcgggggaggcggtcgcccactggtggacggaggcgggggggcccctggggtagactggcggcagcggtggcgcgcacggcacagcctggggcggggcgggaggctgcacgcaaccctggcccgcctcgacccgatccaagcgtcggctggaaccgtgcctcctgacaagatcacctcccgagctgcgctttggccagcgccttccagagccctggaagatctccagcagggtgagctaacccctatccgcagaggctgggctagcctccactgggaaccgacccccgtccctgggaggcggggccgcggggctccgcctccgatcaggcgtcctggctctacgaactcctggaggaggtgggggttcttacgctgatcggcggaagtgcggagatcggaagttgcgcaatcggcttgcgacgacccggtgcg

SEQ ID NO: 51889 - DNA, 454 bp, Mus musculus
  source 1..454: mol_type = other DNA
aaggccagggttcatgcgggatcccgcatacccagacggaacgcggaggtcgcggccgcgctcccagcctggatccccgcccccccagctcccgggtccgccgctagcccgcccgcttggagctttctagggtagaagccgagactgcggtgcggcacgacccggcctcggtagagccgcctggtccccgccccgacgcgccccgactcacatcgccccgcggcccaggcggcgccgggccccgctcccgggtcccgctgcagcagccgccgccgcccgcccgcagctaaggcctcccagccccgccccgccccgcgcccgcggggtcggaggtcgctggctgcaccaacgagacgctgcgggcggaccgacccgagccggggcaaccggcacccagacgccagagggcgctcggggcccgcgactaggactcctgaggggccggggggcgggc

SEQ ID NO: 51890 - DNA, 251 bp, Mus musculus
  source 1..251: mol_type = other DNA
aagagcagggtgcaggtgtggcccctccattcacaccctgggagtgattcccgccctgaaccccagctcccagaagtttaagggggattgggaatcatgacttaagtcagacctccaagtatgttgcaagtaaaaatgcctggagtcattttggagatcatagaaacaaagaattatttgcttccaaatatcaggtgctggtcctgctccagaagcttgcccaggctgggagtcaggggctgggctagctc

SEQ ID NO: 51891 - DNA, 348 bp, Mus musculus
  source 1..348: mol_type = other DNA
tctcctctcaggtaagagcaggccgctcccacaagtggcctctaggtatagcccccaaattttcctagaacttggccggtccatctggcgcagcacaggagagatctgccgtcggccgcgcccccaaaagcgcttgtgggtctcagggcaagaagggcacaggcaccgccaagctgcgaactgtccggactctcccggcccggcccgccccccggcccctcaggagtcctagtcgcgggccccgagcgccctctggcgtctgggtgccggttgccccggctcgggtcggtccgcccgcagcgtctcgttggtgcagccagcgacctccgaccccgcgggcgcggggcg

SEQ ID NO: 51892 - DNA, 199 bp, Mus musculus
  source 1..199: mol_type = other DNA
ccccccataagcggcccctcctgctccggtagaggggggccctatcaccacctgcacacctgctcctcggaggcaatgagggtgtgggtagactcttccccaggcgaggggtgtcgcagacggaggagaaccgtgggccctctccagggcagccagggaagccttggccctgcagaggctaccaggcaggctttgccag

SEQ ID NO: 51893 - DNA, 579 bp, Mus musculus
  source 1..579: mol_type = other DNA
agagaactgttttgattacagttaagatttataacctttttaaatttctcagcagtcctttgaagataactgcgttaatccctatgttttaaatctacattaaaaaaaaatatatatatatatatatatatttaaaccaggcagtagtggtatacacttttaatcccagcacttgaaagacagaatttaaggccagactgtctacaaatctagttgtagaacagccaaggctacacaaagaaaccttgtgttaaagaaccatatatatatacttacataaatatatatttaataaactaaagctctgttgtcctgaaattataataataattaatagagcaacaacaataatattgttattattatttaacaaagaaatcaaaactctccccaagtggaagttgctaagggatagggtagaaaagcagcttgctattggtcctttttcaagatgtaataatatagaaagtcaaacgtttaaagttaaaaattgactcttcgcggctgcgacggggactacatttcccagcgggcacagcggggggcggtccgcaggaggggcgggtgctgccctctgcc

SEQ ID NO: 51894 - DNA, 768 bp, Mus musculus
  source 1..768: mol_type = other DNA
tcgcggctgcgacggggactacatttcccagcgggcacagcggggggcggtccgcaggaggggcgggtgctgccctctgccgggcgcagcgggaagtgggcgcggagtgacagccggagcccaagcgccgggcgcggggctaggtgacagcggaggcggcagctgcgggcgggacgcagagaacggagacggcgccgacagcggcgggggcgggtctggctggtggcgcgtagcccgaggagcccgacagcgggcggcgggcgaagctcgggggctgggcacccgaacttgggacaagttgccggaacctcagggcgccggcggcggacagatggggtgcagggggaccggggaacgccggcgccgcacttcccatccttggagcaggacagggtgcactgcgccgccacccacccgcagccggtgcagccctgggtacccggcgcgtggcccgagcgatgcagctcgccagccggggagcccctcgggcccctcccttcgggccgggccgggggacgcctccccgcgaccttatgtaaccggggcgggagtggccggggcgggcacgggccttcctggcccggggaagctgagcggagctggggctcccgggccctgagctcgctctccctcccccgatagaacgggggcggggggggctcggggcaggcaccaaggccggcggggcctggcccagcctggatggtcgcgcggagtgggagggccggagaggcgccacgccccgtgggctgggctgcctgagtcccg

SEQ ID NO: 51895 - DNA, 273 bp, Mus musculus
  source 1..273: mol_type = other DNA
tgtctttcatgaagtgggagaaaaaaagacttccacgtttctcgagaggccctccagtgttccaaggcagtgcaggaacaaggctgagttctgctcaggcagctgacatccctggagacacccaggtgggctagcttgggatagccccctcagcaagggcgtctccggggcttcgtcccaagggcccctcagctgatggttctggctctggtggcctcagtttccccaaggggacagtgggcagagcgcccccgcctggtgggagctggcaga

SEQ ID NO: 51896 - DNA, 331 bp, Mus musculus
  source 1..331: mol_type = other DNA
gggaggcagtgactggctaattatatagtatacactattcatgtaaaaaaattaattttgtgtgtgtgcataaacatgtatgcaacatatgtgtctgtaatcatatgtgcagaggaggacattgtatgttgccctgtccagcactggcagccagcagccccgtgacctgctccctggacagtgctgggcgtgcaggtacagatgcatcgacatggactatgtgtgcctgtgtcatcactgaggatggactagggtctgctcaatgaccaagatggagctaggaccctgttcatcttccttctgtcttctcagagtggagcttctgcactga

SEQ ID NO: 51897 - DNA, 279 bp, Mus musculus
  source 1..279: mol_type = other DNA
ttggttggggcctcagccacaccttcccacagtgggtcaagctctgagctccgagcagtgaggagccctgaggtctctcgccgactttgggcgccaggagccagggacggggtacatctccagtgcctggttcatggatcccctcaggggacttgcattcctagtaaggaaaaaaatatgttctgtcctagcacagtggtcctgaaatggcactctgaggtgacattaggaggagcatctggaggctcctcaggccctgaggaggcgtggtgcaggctg

SEQ ID NO: 51898 - DNA, 393 bp, Mus musculus
  source 1..393: mol_type = other DNA
aggaggtgtcctggcgccgccgcctccctgtggacccagacgccgccgggcttggaggcagctcaggtccagtgtgagtcccagagggacttctcacctgaggctcctggggtcactctgagggtctccgagccagaaagttggagtgacagcctggtgatgggcagtctgtctaagaggctgatgcgacaccagcccagcttcccggagagccagtttctgacggactgattttgatattctggaaacttttacaaagtttaagaccggccgcgaggttctcccggccctgggtaggcggccggcttcctgtgggggctcaggcctcggacgccccgcggacagacgtgtcctgccctggcagcagcgagtcccgcacgggggaggggacgc

SEQ ID NO: 51899 - DNA, 407 bp, Mus musculus
  source 1..407: mol_type = other DNA
tactctaagaattaaaagtactagcaaacctcccagcccttgggaggcaaagcaagtgtttgaggctagcctgatctacatagtgtgttccaggccagccatggcaacattgtgagaccctgtctcaaactgtggccagagggtcaggaggctcaagccagcttgttgacacaacgagattctgtgatactaggtaccataccaaaagagagcccctcaaagcagatgtggggccctcatcacagaggactttgtggccacactggactgcatgttgtcccaattgtgatacttggtacagtatcaccttttgaaggcaggtgaggcccggcctaccggctcaggtaagccgggagcagccgccaaaccctcccgcgggcgcgtcgcagtgactcagccgctaccag

SEQ ID NO: 51900 - DNA, 335 bp, Mus musculus
  source 1..335: mol_type = other DNA
gatgaaactcattattttatataatactctaagaattaaaagtactagcaatagtacctcccagcccttgggaggcaaagcaagtgtttgaggctagcctgatctacatagtgtgttccaggccagccatggcaacattgtgagaccctgtctcaaactgtggccagagggtcaggaggctcaagccagcttgttgacacaacgagattctgtgatactaggtaccataccaaaagagagcccctcaaagcagatgtggggccctcatcacagaggactttgtggccacactggactgcatgttgtcccaattgtgatacttggtacagtatcac

SEQ ID NO: 51901 - DNA, 349 bp, Mus musculus
  source 1..349: mol_type = other DNA
tgggtagagagtgggaggattttttttctctctctccccctgggcacaatctaatttgttactttgcagaccgaggcggcagcgcgtgcgcgccgggatgggaccccagcccccacacagtggggagtcagagggaggcgcggcagggcccgcgctggacgtcggcttcggactgggggggggggggtcctgaccactccccgcgccaggcgcagcccgcccacttggccgtacctccaggttccactcccatcggatgggtccccagtccactgtgaaactctacgcctatcgacttggccgcggtccccccgcccggtgtgccccgcccgcgcgccgatcgctcgca

SEQ ID NO: 51902 - DNA, 269 bp, Mus musculus
  source 1..269: mol_type = other DNA
ctagacaggcaggccagctgttgtgctggacttgatctctttactctagccaataaaaacctaagctttgagcatcgaagtttatcatcaatgtctagatatctgcccacatactaatctttgatcatgagtcaggcattgctggtgctacctttaatcccagcagcacctgactcttcagaggagaggggtccccagctgaactgtgggctctgtggtatctcatccattccacagaggagctggggaaggctcctccctttaagcta

SEQ ID NO: 51903 - DNA, 515 bp, Mus musculus
  source 1..515: mol_type = other DNA
cccctgggcacaatctaatttgttactttgcagaccgaggcggcagcgcgtgcgcgccgggatgggaccccagcccccacacagtggggagtcagagggaggcgcggcagggcccgcgctggacgtcggcttcggactgggggggggggggtcctgaccactccccgcgccaggcgcagcccgcccacttggccgtacctccaggttccactcccatcggatgggtccccagtccactgtgaaactctacgcctatcgacttggccgcggtccccccgcccggtgtgccccgcccgcgcgccgatcgctcgcagccactcgcagccggggctcagtcgcagcccctcggagtccggagccggtcgcccctacggaccggacagtgccaccagctgccgggacggagccccccaacacgcgatcagggcgcggcgcaggcggccgcggcgcggcggggaggagcccgggccggaaccagggctgggccgggggcggggacgccggggtcccggagc

SEQ ID NO: 51904 - DNA, 356 bp, Mus musculus
  source 1..356: mol_type = other DNA
tgtgcagcattgccttctaggatgatagtcaggcaccatcatgcctggttttctccttacttatctgataactgggaagagcctgtagctattgatatttcatagcgcatgcactgacatgcatatttatttacttaagttttatttctgtgtttagcctgtgggtcacagggctcaaactcaggttctcagtctgggtagcactgtgacaactatttttaaaatgtttaacgaatacatcaaattcttagcagtgggtaaccatagggcctggggctccccttgttccacatgtgacaggtagtgggtgaattgagaaatgagcattctcttacttcacttcctcctcaggcctg

SEQ ID NO: 51905 - DNA, 207 bp, Mus musculus
  source 1..207: mol_type = other DNA
taaatatcctgacgacaacacagtgcacatcccttcctagggaatggtgccacccactgtgggtgggtcttcccattgtgtcacattagtaatgaatatatgtgagtatccttggttaccccagtcccacaggccatcagcctctgacttcctgagcacagtctgtgccttgcagttactggacatctgtgacatcacctgtgacat

SEQ ID NO: 51906 - DNA, 339 bp, Mus musculus
  source 1..339: mol_type = other DNA
ggttggcgccagatttgggctagcgcctgcgcgccggctgcctacaggcctcatgtagccctaggatgatagtcaggcaccatcatgcctggttttctccttacttatctgataactgggaacagcctgtagctattgatatttcatagcgactcacattttagcctgtgggtcatggttctcagtctgggtagcaagacaactatttttaaaatgtttaatgaattcatctaattcttagggtaacatagggcctggggctcccctttcccacatgtgacattagagagggaggagaaatgagaattctcttacttcactttcctctcctcaggcctg

SEQ ID NO: 51907 - DNA, 378 bp, Mus musculus
  source 1..378: mol_type = other DNA
ccacaaacatcatggccaaaaagcaagggccatggagggaagttccttactggcttgcttcccccaaggggcctttccaccttgatcactaattgagaaaatgccttacagggatctcatggaggcatttcctcaatgtgataactccagctgtgtcaagttgacacgcctgaggcaggatgcatctatctgcccagttctagtgctttaaagcttgtgctggggtagggtggggtgcggattctacccatcccccctcccacaaattcacagacttccttactgatgtcagcccgcagggtggccagtgacagtaccttacctcccaggaatggcctcacatcctgttgtgaaactttccagagagtctgggtacaa

SEQ ID NO: 51908 - DNA, 232 bp, Mus musculus
  source 1..232: mol_type = other DNA
acacatgtctgtgatcccagcacttgggtttggactttgttgtgaaatcccatcccaaactttctgcaggcctgtgaattcagggcctctgactgtgcatgcctagcttcctgagtgatccagctatgaggtctcactgagaactgttggtaaagtgcctgtcacagaaacaccagatgtgtggtgtacgtacatcgcccatttcccttggtgtttctcaatgggacaaaac

SEQ ID NO: 51909 - DNA, 383 bp, Mus musculus
  source 1..383: mol_type = other DNA
ggtgttctgatagccagtggcccagctggactccactttcagtctctcagatcttgacagtttgtgggactaggtttaaaccctggagacccagcctgggtcacccttagatgttaatgagagataatttttctcataggttgtggcttacaaaccttccaggatgacaacatactggaggtgagggccctgacttatcttagtgatggggattcccaggactctgggcacacctctagggacctttgacctttctcagggaaaaagaaaagaggaacaggcctcttacttctcatattgttcctgcagttaggagtccccagtccaggcctgtcctgcagttaggagtccccagtccaggcctggccactgttcctcttata

SEQ ID NO: 51910 - DNA, 344 bp, Mus musculus
  source 1..344: mol_type = other DNA
cctcacttcaagaagcctggaagccttgtgtgtgtgtgtgtgtgagagagagagagagagaagagagagagaattttaaaatttgcatcttgtttcccccttttaccagactaaagaccttccttctgaaggagtatgtcaaggcctgccagagagcactgctagaagcctctcctccagttccccgagtggaggaccagctgctgtcctgcagagaatcacagacattgtgttttctctggcccaggggccccaagacagggtggagcagccacaccagggcggaaacagacagctcccggctccactgggggcattgtgtgccacaggggctcacttcccca

SEQ ID NO: 51911 - DNA, 411 bp, Mus musculus
  source 1..411: mol_type = other DNA
cctcagttgtttgttctggggtctgaaaccaaaccctgggactctgaggatggaactcaggtcctttggcttctcaaaagcccccttacctgctgagccgtcttgccagtgaacttgagcagccaaggtgggggctcctaaatgtgtcaactgacattctagtcagtcagtcagcctaggttcaacatcaggtgcagatctttccaggaacttctgttcacagtattaaatacaacagggccatgctaatgaatgaatggatggatgaatgaatgaatgaatgaatgaatgaatgagtttccttctttaacttggctgtgcaaatggcagaactttttgttcagtgtcctaaacaagtagagggatcccattcacggagtcccgttgcacagctgttggacatcagtagag

SEQ ID NO: 51912 - DNA, 350 bp, Mus musculus
  source 1..350: mol_type = other DNA
gggttggcgccagattcgggctagcgccggccggctgcctacaggcctcatgtagccctaggatgatagtcaggcaccatcatgcctggttttctccttacttatctgataactgggaacagcctgtagctattgatatttcatagtgcatgcactgacatgcatatttacacagcctgtgggtcatggttctcagtctgggtagctgacaactatttttaaaatgtttaatgaatacatcaaattcttagcagtgggggtaacatagggcctggggctcccctttcccttagagttctagggaggagaaatgagaattctcttacttcactttcctctcctcaggcctg

SEQ ID NO: 51913 - DNA, 256 bp, Mus musculus
  source 1..256: mol_type = other DNA
gggcaagcaaaagtgctctctctttctccctttgcctgcatgttgtcatgctgccggccatgatgataacagttaaattaaagaaacacaccggctgtttccctatcccctgctgattggggtaatagacacagttaacccttgctgaggatagccccgggataaacttgcttgccactgtcctccaagccagctatgcagggccacccatgccagccttgcgggaactcaatccaggagcacagttcctgtgggc

SEQ ID NO: 51914 - DNA, 283 bp, Mus musculus
  source 1..283: mol_type = other DNA
acatgtgaaataaaagtaaataaatctctttttaaaaacgagagaccccagaaccccaggtggagatgtaagtctgaaactcccacactcgggaggtagagagaagttcaaggtcacccttggctacctaacaactttgaggctagcctgggagtatggtctgtagcctctgaagaaaaatcatccttgtgggtttgaccctgggccacagcttgagccaagaaatctatggaaaagttccctgtatgagacagatgtttcctgcccccaggggcctgcagtt

SEQ ID NO: 51915 - DNA, 382 bp, Mus musculus
  source 1..382: mol_type = other DNA
tgtgagctcactcagcctctaagcctccttacttctgggaaggtttaggacagtccagaattttcccagagatggtgagccgagaactgcttctcaggggaagatcaccaccaaggaaggaaggtctgataagacttccccgtctctcctcctaccctaggagggcaaccctgggatccgtcagcaggccctcctccaagcagggaagggttcgggagccgcccccatcccttaacggggcggaagtgagcctctctagctgggtagcggcgcccgctctaatttccggcgggaaattccgtaggctcccgccgtgtttaagcagcagcgtgagcgtgtgaaaggcgcctgcgtaggcctttcctcgcttgcgcgaaggcgg

SEQ ID NO: 51916 - DNA, 637 bp, Mus musculus
  source 1..637: mol_type = other DNA
ggtaacggcgccggcccgggagccccggtggcgggccgagaggaggggcgcggcaggcgcgccaacggccccggggtgggtcttgggaggccgcgccgcgcgtctcagtctggcctcgctccggatctgtagccccaactgtgcagagctcaggacacacgggcctcgtcggggcccggaatgtggggacaaaaccgccacggtccgtggctgggcggtcagccacctgacctctcgggaccgaggatcggggaccggtggcgcatccgccaccggcccccggagacgatccaggctccaggacgccgtcccaacgctggacggcccctgcaggcctccaccaactccgagccggggctactggctacccagctcgggcagcctcggctcgactcccgggctcgacggacgcctgggcctctcctgagtggtcagcgagacccgccaatcggggcgctggggccggctctgggccgccgctgcccgcgctgattggctccagtaccggaccccgaaacccaatcagaggctccagccgccgctgccgccgccactgccgctgcctcgcaccgccttcgcgcaagcgaggaaaggcctacgcaggcgcctttcacacgctcacgctgctgcttaaaca

SEQ ID NO: 51917 - DNA, 379 bp, Mus musculus
  source 1..379: mol_type = other DNA
tttacttagcggatatagcagctgacccctgcaagctccttgccaacagagcatctgctcagcatgcgccctcaggcaggcacaggcttcaagcctaacttcaggtcttctggccgatgcactcacgggcgagcatatgctcgtgcgcatgcgcaaacgcgcatccatccccgagttccccccaacgtgggcgggggaggggggtcactatctgtttaaaacaatgaagaggagagacggggtagaattggcccagccctccccacctgccagcttcctgtctgcctgctgataaatagggggaaggggagcaccaaatccccagccaggcttagctgctgacagctgcttgggactctgccgccaggcccttggctgg

SEQ ID NO: 51918 - DNA, 371 bp, Mus musculus
  source 1..371: mol_type = other DNA
acagagagactctttctcagaaaaagtaaacatcttttcaaaatgtaatctcactcttcaaaacaatttacttagcggatatagcagctgacccctgcaagctccttgccaacagagcatctgctcagcatgcgccctcaggcaggcacaggcttcaagcctaacttcaggtcttctggccgatgcactcacgggcgagcatatgctcgtgcgcatgcgcaaacgcgcatccatccccgagttccccccaacgtgggcgggggaggggggtcactatctgtttaaaacaatgaagaggagagacggggtagaattggcccagccctccccacctgccagcttcctgtctgcctgctgataaatagggggaa

SEQ ID NO: 51919 - DNA, 289 bp, Mus musculus
  source 1..289: mol_type = other DNA
cctgcatcctgggtgtagctgtctttgttataccaagctgtctgagtcacacagaaaactggactttgccagaagacagggtcactctcccgtgcttgggatctgggagggctctgccagcctccagtccccagccaggcagaggcaggcttccagaaaggctctaaggagatccgagggcccctcccatccccagggacactgggtcacaggcacagagagcatgggtaccagtaggagccctcttgctcccctcccttttcataagagaaaggcaggtcggtcacga

SEQ ID NO: 51920 - DNA, 266 bp, Mus musculus
  source 1..266: mol_type = other DNA
attgaaactgtgagaacggtcaaaatcttgttttctaactatttcaaaatgcaaggtacaccatgttgtcagagcaccaggagagtcagactgtactcagccagcagaaatcaggtgggtaactcccccctcagcacgctgagtgtccccaagggcagcatcccgccaatccggaggggcagggagtgagccgctgtctctggcccaggccctgtggaatcagctggaagagaaattggccaatagcccaagtgtacttgtctact

SEQ ID NO: 51921 - DNA, 415 bp, Mus musculus
  source 1..415: mol_type = other DNA
actcttaagggtagcctgtccctttaaggctcatgtcaccatctcataggctctgagagaggagagccatgtgcacctctttcaagtcgctcgcacactggccctccccaggaggtggcagtcaccggttaaccaccgcggcaagctggtcacgtggcctggagaaagagatagttctcgctactcccatttgttttttaattcaagtgagaaacagcctgtcaagacgacagcgtgaacgtcacagtcctcctttggagagggttctggaggcccccctgggccagacagcccgcaagtggctgcagctggccatgttctgctccccactggtgccagggcagacacacctgcagctgcgcgtctacctgcgccctgcagtgggctcagccgcacgggggacgcatgcgcgggc

SEQ ID NO: 51922 - DNA, 450 bp, Mus musculus
  source 1..450: mol_type = other DNA
gtccttttaggatgcatttgcaggcaaagccaagaagggacctctgcatccctgcaaggcagcaaggatggtcagcattctccacgcttcagccctggggccaagtgggaggtctcatgggtacacaggccagccccagggtgccctgagttctttagagtaattactgctctttcaataaatggtgaggttttaatttcaccaaggcatgcataaatcgcacgctttgtaacacagttctgcaggactaaagactgtgtctttttggagggatgcccccaataaatagccaaaattaatttgtgtttacacatgtataccatgcatgtgcttgcttcttggagtccaaaagaaatcactggagccccagagcttgagccacagggagttgtgagacacctgacttgggggactgggaaccaaagttgggtcctctacaagagcagccag

SEQ ID NO: 51923 - DNA, 376 bp, Mus musculus
  source 1..376: mol_type = other DNA
ttttcatttgaggataatagaaaattctggaatctagaacaacctgtgcatattgaaaaatcctcatatatatataatatatatttatctattatatataaatatatattatactatctgcattttatgtcagttattgtttaaaaaatataaagtgacatattagaaagtggtgaacattatttgttgatacaatctttcatactggctggatacttagtgctaagcctgtcaaagcccagaaaaggagggcctgttttatagcagcgtcccctacttagacatggggcccctgggtgtgccttctgaggccaagccagaaacagccctgagttcagaagaaagggataactccaagtccctgggacatgccctt

SEQ ID NO: 51924 - DNA, 492 bp, Mus musculus
  source 1..492: mol_type = other DNA
tcctttcataaatctgtttttaaacggagaaacaaagactattgatgtatgggagacacaactagaagtaaagttgatgtttttaaatagaatattggtattttattttatgtattgagatattatttgacttaagactatgtcataaagtagcatgctattttgtatgctaacttaaaaaataagttaagggactagtacggctcttccccctgctggtgtctatggccaccaactgcgccatggtgacattaaaaaataatttaaagagtaaaaaaaagaaaatattattttcattggagtcagatctgtacatttgaagccatcctggtttacaaagcgagtccagggcagccagggttacacctttgagacactgtgtaaggagtttttatgttaaattctgcatctaaagacttccgtcctggaaggggcggagaggcaccctcgctgattggctacttgggcgggtcccgggctagagtgctctgg

SEQ ID NO: 51925 - DNA, 241 bp, Mus musculus
  source 1..241: mol_type = other DNA
gggtttttttttctctttatagagaataactcccccttatctccttccagtgggcattggcacttaagctaatcctgaaggcttccttggactcgtctaagacaatgaaaggctgaaacagtgcctggagggactgggtgagccacttagtcctgcactaaagagggcagataagcttctcaccttaggcttgctcatccagaatgtttcaggaagactgtctctttaagagaggcagcta

SEQ ID NO: 51926 - DNA, 229 bp, Mus musculus
  source 1..229: mol_type = other DNA
acaataataacaataatagattgcttttatgtaggagctgccaatattgacaatacactaaatgcaagcttttggaggggaacataatttaataaaaataaattttataaaaaaccctatgaatagttggccagaggagggaaagagcgggccccagtcctgctggtccttgcacctagggacgcctgacgtcagagcggggcgggcggcggcgcgaggccggccggga

SEQ ID NO: 51927 - DNA, 273 bp, Mus musculus
  source 1..273: mol_type = other DNA
cttgtaacaaaaaaaaaaatagccaaacttccttttttcaatgcggttgtagtattttatactacccacttcaccagccccctacacacacatgtgtacatatatgtgtgtatatgtatgtatatgatatatgtcacacacatatatgtcccatgtatacatgtatatgtatatatgtgcatgtatatgcatatgtacgtatatcacaaaatggtttcccagtgaacacggacatgcgcggcgatccctgccgggaacccggggccgcggtgc

SEQ ID NO: 51928 - DNA, 435 bp, Mus musculus
  source 1..435: mol_type = other DNA
gtaatcaaagccccttatggtaatgatgataataacgataatcgcagaattatagaacgcttccaagcattttccatttagtgctaaggacagaaggcagcaatccatcctgaccattttaaagaatccattttgctaggctaagatgacccaattgcatcaggatctcaaacctttggatacttctcttcccaagcactacctggggacgttcccaggaatgggtccagcagcacgttgatggccgtcgttggctgccaccttggtgctctcctaagcaggtcccaaaacccaccggttgcgcggcgctggcgacgcacggggcggacgggtctctcgtgcggggctgccaggggccgctcggcttcccccaagaagatgcagcacagcatgggcggacgcgcggcggaggcggcggcggcggcgcggggtgga

SEQ ID NO: 51929 - DNA, 455 bp, Mus musculus
  source 1..455: mol_type = other DNA
gctttggaaagaattgccagcaggtatcccagtagatggcaagctctcaaattatctgagagatttagttcgtagtccaattctagaacgattctccaggatctagaagatgtaggtctgtgcacagctcactgtgactcagctaccaatgtcagtggtaggactgtaccactactgctggctgcagatatccctgcctccaggtcctcagaatcatctttccaggacaggtgttctttcttgtcaagagaagggaatgttgtcaagattacccagagctctgagagcagctggaacaacactttaaaaaggggttcttagatatgcaggccactcaagtgccaggaatggctttcctgccctggactccctttgcaaactctatatattttgtaaactctgtacactttataaagtttgtaaacctcaaggctgagactgaggctctccagcag

SEQ ID NO: 51930 - DNA, 447 bp, Mus musculus
  source 1..447: mol_type = other DNA
ttaagctgttttgccagctttaaaaaaaaaaaaagctgtaatacttatcatctgtacaaaaggtagtcaggagaatgttctagaattctcgacgggccggcccgtgaggcatgaggtgcgccttccacatgctgaaggggcccggccaggcaaggcctgctctcgggcattttgtaaattttaaattcggccgccaagctttttgaggtaatgacttgaataaatgctttcctgacagaactctgagcaccgtcctgcccaggatcagtgaggctcgggcctgctcggcagccgagacccttacgtagatgtcgcgcatgctccatgcgcacccctcacgcactccgtgggcgacgtgggtcccctggccccccttgcgaggccctagcgctgccgcctattggctgtagcacgtcacgaggccagccacgcacagtcatccccccg

SEQ ID NO: 51931 - DNA, 719 bp, Mus musculus
  source 1..719: mol_type = other DNA
cactggagctggacgcgaggtgcagcggccaagaccacagccccaggaccctcagctcgcccgcggcctgcgggttcgctgtccccctcgggatgccttcaggtgactgacagctggctgtggcgtgcgcctcgctgagccggcctaggagagcgaccaacgcccgtgcccggagcccggacgggtcccctcggcctgtagggggcagcgcgaagcccgggaggcgatggccgcgggtaagtggcggtgggcccgggggccatcagaagccgccctgggcctcggctgagccctgaacgggcctgggcggagccgggaaccccggagccccgcgcgccgcgcctccgcgtgtcgccagcgccgcggagtgggcgcacgtgtccctcgcgccccgccgccgcgagctcgtcggtgagcgcggggccggaggggacgcggcgctcgtcggtgagcgcggggccggaggggacgcggcgcgcggcggtgggcgctggcgcgcgcgcgttatttttggcgcccgcagcggcgcgtgtgccggggcgtgttttcttccccaggtgccggcagcgggggcgccgccgcccaagctgaccagaggtaattccgcctgcacgacgtccttcgcgccggaggcgagctcgctgcacgcgcagcggccgaggcggcggcggcggcgaggaggaggggccgcgcgcagcggcccgaggcggcggcggcgg

SEQ ID NO: 51932 - DNA, 360 bp, Mus musculus
  source 1..360: mol_type = other DNA
gggaccctgtccaatagatgaacttctgtgtttgccaggcactggcatagcctcacaagagacagctatatcagggtcctttcagcaaaatcttgctggcatatgcaatgctccccgggtggaacattggatggtctagagcactagtgtttcaaaagaaccatgacgacatttttaattagatattttcttcatttacatttcaaattaccaatagttgtgccagcaccatttgttgaaaatgctgtcttttttccactagatggttttaataccttgtcaaagatcaagtgacaattgtaattccagatgaatttgcaaattgccctttctaactcagttaagaattgtgttgggggc

SEQ ID NO: 51933 - DNA, 370 bp, Mus musculus
  source 1..370: mol_type = other DNA
caacagtgctagctagagtcaacccaaagcactgccctgcctttgtggtgtggtattccagagcccagccagcatcaggctggtaggtggtctgtagttatgcctcatgttgggaacttttgcaaaggttacaggcattctttgaaagttatctaaaaaagagacttcttttaaaatttttattatctttttaaagcacattcctatttagttacacagcaaagaaatacgctctaagtggtgcactgctgtgtgacctattgcgttaccacacacattctgtctctttaaaaacacaaaaattagagctgtaattactgtccttttcaaaattaaagaaagtagcagacatcgagccagttaattggct

SEQ ID NO: 51934 - DNA, 334 bp, Mus musculus
  source 1..334: mol_type = other DNA
ttagagctcttagttttaaaatatatatgtacataatggtattatatacatatgcatattgcactaagtgtacaaaagtctaatttccccttgaaaactagttgtaattaatgaattgacttgaactcatcactctaatcattagaatattgagtttggaactgctaatttttcctttaaaatgagcatacagtcgagtgtttcatggaccataataaataaggatgctgcttcctttaagacttttagttctcaataaatgtaggtttacaatacataactttacaggattcgtgttgtatataacaggttgaacatattatctcagaattca

SEQ ID NO: 51935 - DNA, 601 bp, Mus musculus
  source 1..601: mol_type = other DNA
tttggtttccataatctgaacataacaactgattttttttttttttgcgctatttgtaaagacagattaataagagatctctctttctcttaccactttcttattgaagaagaaaatactggaggttaaatgcaactttaagtcaaaattgtcattcattagattaactatctaatgactagtcattagtctagattgagaagataaaacctgtgtgtttttacaggtgtggggttgctaaaaaactctggattcatacaaagaaggtcttcacaaagaggtagtgagtccctacaaaattgggtggcacgtgtacagctatgccagtcccaccctgggaagcggcaagtgggggacctcgggttgtggcagaaggccggctcccactgtagggaggccccgcgcgcatgcgcatcggcatggcccaggcagctccattggtctcccagagcgcgggtcacccgcggctcacccgctggctcgtcccaggcccgggcgcgcgcctgcgcacgggtccccgggcgcgcggggttactagaggtggagcgccgggagggcggacgccgttacggagggagcgtggtcacgtggccgctggtca

SEQ ID NO: 51936 - DNA, 516 bp, Mus musculus
  source 1..516: mol_type = other DNA
gagcagactatggtcttaatacagctagcatgtaaatcaaattaaactatttcccatggtaatttatatagcattgctaactgctgttctgagtctatttaaacttgatgtcttcataaagtgtgatcaatacattaacacacattattttgtacttttgatcttttttttttaaaggcttttttaagatcagatatttcattttagagtaaatagatacagattgtgtgtatacatattctgggtgagagtagagcatttctcgatagtaattctaaccacctccccctcaatggactttcaaggatgcgaaaagcagctagctgctttccatggataaaacattcacatgtatattattttactttaccttgagtacttatgcaggtcccagtaatagaggagggagctgtctgactccacctgcttgtgacttcccttcactccccccacctaggtgtgcaggaagtggagggcgttcggggtggactctactcagagctatgacctgatttg

SEQ ID NO: 51937 - DNA, 597 bp, Mus musculus
  source 1..597: mol_type = other DNA
agaagggggtctgcaagaggccccctcctcctccagggaaggaggtcccctctaggaaagatcttctccatcaaacattgaagagaggggcctactggggagcgacacaccccacacaagctggcttgcggggcgcgggggttgtgctgagggccggggcggtggggctccggggctcgcccacacttaccctggcggccgcggggtcgctctcccgcagcgaccctgcacccgggcggcgctcagggatgtggcggctgcggtggctcgggctcggctcagctcgggctccactgcgcgctctcggagccaccggccgcccaggatcctgccgccagggggagaagcggccgcgggcgcgggggaggcaggccgggcccggtcgctcccgctgtggggtccgcaagccccccacgcgggcgagaggcgagagcgcggcgccccaggcacgcacggcccccggccagcgtcggggggctctcgtgggggcgccccgatcgcccgcgccgcgctctacactgcgggctccgagcggctcccgcgccccctcccgcgccccgccgcgcgctccccgctcgctgctcgccgcgctctgcc

SEQ ID NO: 51938 - DNA, 492 bp, Mus musculus
  source 1..492: mol_type = other DNA
cccaaccagtcgaggggctgaggactgtttttttagttccacgtattttataaatcaataaaaataagcaaaagtgggaaagcattacccatttaagaggggtttttcttctggtaatcagagtggcaggcattcaggcaggtgcaccggaaggggggcacctccctccggagccccaggctgcctttgctacctaggacaccacgctggggtgcctccccctcccaagttctaggcggaggcgggttacctgcacacccacgggactctggtctcccgggagagggcctgggggtactcgaggcttagcgccgcagtctccccagatggggcgccgtcctccacgaccctagagcgcgggtcagggcgcggcgccccgggccaccgtgagctctcgaaggctctacggagagaccctaggggtgtctgggcgggttcagagctatgatcacgggctgctctggtcacagtgcagcggccagggagtagctc

SEQ ID NO: 51939 - DNA, 242 bp, Mus musculus
  source 1..242: mol_type = other DNA
gaggctaactaagtagccgttgctagtctagagcacctttgtagaccaggctagcctggaactcacagtgatcctcttgcctctctgactctgagcactgagattataggctctgtgcattccagatcctttagcattaagataactccaagaagaagctgatagccatgtgtatctatatctccatggctcagcctttgaaagctttctccagaagaattgctcgccaagcagactccatc

SEQ ID NO: 51940 - DNA, 277 bp, Mus musculus
  source 1..277: mol_type = other DNA
ttcaatggggaattccaaataaacgctaattattaggatttcctccttttctctcaataaaagcaagttattcttttgaggttaagggtcttaattctctccgagatcacagactgtgacccaggctgacaatggcagtggggacggcccacgcctctcgggttcccaacccgccggcttagagcgccgccccgcccccttaggaagccgctgccggcctcctgggaggggcagcggcggaaatgacgtcacggcgttcttcgctgcgtgcggctac

SEQ ID NO: 51941 - DNA, 298 bp, Mus musculus
  source 1..298: mol_type = other DNA
ctctcaataaaagcaagttattcttttgaggttaagggtcttaattctctccgagatcacagactgtgacccaggctgacaatggcagtggggacggcccacgcctctcgggttcccaacccgccggcttagagcgccgccccgcccccttaggaagccgctgccggcctcctgggaggggcagcggcggaaatgacgtcacggcgttcttcgctgcgtgcggctacgtggcggagccggcggaagcagttcctgccgaggaagaagtcctcggggagacgcagcccggcaggggcgg

SEQ ID NO: 51942 - DNA, 269 bp, Mus musculus
  source 1..269: mol_type = other DNA
caggctggcctcgaactcaggtgagcttgaactcacagagatctgtctgccggtgggtgccaccactacctggctcacttatttttgaaacatggcttcaagccatttctgatactttataaaatgtatcataggtataaggtggaacatttaaagctgctcttctgaaccacatggtggctcatctgatggcgtgtctgctacagtgtacttacatataataataaataaatcttaattaaaaaaaaaagaaattagaacactgtaac

SEQ ID NO: 51943 - DNA, 275 bp, Mus musculus
  source 1..275: mol_type = other DNA
tgagcttccacactaggctaaggtcaagcctaggtaaggacttcagttagggtgtcactcctttgagaagagacttctttctctgcatcataatcccatttgtgaaaatcaatagttttgattttgaagtttaagtcaaaatcggaattgtctttctggttaacttgaaaacaatattcatttcgccgactctggtcatattcggttcagaaactaccaggattgtttaaaaaaaaaaagtttaaccatgattttggtgaataaacatttttttt

SEQ ID NO: 51944 - DNA, 470 bp, Mus musculus
  source 1..470: mol_type = other DNA
taacttgttatattggctacgtatatctatctaccttatggcacaagacatcttccttgactattatcaggaactgataaagaagtttagattgttcccgggaaagcactttatcacttggcgtttcttcttgaatcagccaggcccacccgcagatctcgccagcgggctgaacctggagagcccagtgctgagcctgcgctaaactggacgtttgccacacgggcgcgccccggagcacaagagctgcgcggccttgggcgccctgacaagccactcagccttctgagagctgggctctcaggcctgcgtcaacaccccaggtctagatctctaggctgtgggaaggcggacgccgagccaaggcctcaccccagccacagctgcgcgtgcgcaggcgcgccacgtgatgccattccccggggccgggcgctgcgtctacggagaagggcgggccgtgtccggccagc

SEQ ID NO: 51945 - DNA, 484 bp, Mus musculus
  source 1..484: mol_type = other DNA
tcctggggaatacaggaatttgtacaaacttgttcatttctctagaaagtactctttctttcctcacatagatagataatttcttatgtatcttccttgttaatgtctcctgaaagaggcacaaagagttttcgtctcttaggcatggaagaggatggttgctcctgtgtgtagctacactgatgattttgaagatatgttagaatatctgcaaaatcttcccggaacagggaacatgtacatatttttagatatgcccttaatattatgaggatgatcattgaaggaggataactctattaaacagtgatagctttttaagacagactggttgtctgtgaggttcaggacatgtcagagcaattgtggttacaaccatgagaatactttttaaaaaaccactgtggggttttgcagagctgtcattggtctcttgcatgtgacatcataatgagactttcaatagcaagctgctgccaaagcc

SEQ ID NO: 51946 - DNA, 350 bp, Mus musculus
  source 1..350: mol_type = other DNA
gttagcatgcctcacattttatagatgtagaaaggaaaactggatgcgaatccaattctatttacttgccaacagaagaggtaaaaaaaatttttatctgaaatatcttttaaatttactcatgttttaagcttctttccaccataggcaaggcgatgttaagaattagtttacttagtgaaacctgctttaccatgtagatcagcctcatgcagctgctttgagtcacaggctgttttgagcaaaagactgaacgtgacagcttttttttttcctattttaaactctatcagactagagagaaagaacagagacgagcgatcactacactgtgaaagttacttcctcat

SEQ ID NO: 51947 - DNA, 341 bp, Mus musculus
  source 1..341: mol_type = other DNA
ttatagatgtagaaaggaaaactggatgcgaatccaattctatttacttgccaacagaagaggtaaaaaaaatttttatctgaaatatcttttaaatttactcatgttttaagcttctttccaccataggcaaggcgatgttaagaattagtttacttagtgaaacctgctttaccatgtagatcagcctcatgcagctgctttgagtcacaggctgttttgagcaaaagactgaacgtgacagcttttttttttcctattttaaactctatcagactagagagaaagaacagagacgagcgatcactacactgtgaaagttacttcctcattagatcgat

SEQ ID NO: 51948 - DNA, 433 bp, Mus musculus
  source 1..433: mol_type = other DNA
ttctccaaggtatttggatataacattaagttattaatttgtcatatcaaaaatttatgtagcagttaagagcactaacataaaaattaaaaaaaaattatgtaagctttagttgctacaaacttatttcattcaattttagaaagttttgaattatctcttttgttactagaatggccagattgaatgcatggtgttattttaatctcccaatataacttttatttttaattttgagattataatttaattacagcaaaaaccatttttttactaattgctatcgaatagatatttgtatataaatatatcttcctacatataacctgcttagatcatatgagatcagttgtctttatgtaaggttaaggctgttgcatgaaatattaaaaagcatcccatgctaccaccggcatggcaccggtggacaggc

SEQ ID NO: 51949 - DNA, 319 bp, Mus musculus
  source 1..319: mol_type = other DNA
ccaggctacagaaacaacgaagttggaaatcaatgtacttttcaaaaacgtcaatggaaactttagttaggtgttttccttgttactcacaggatataaggtataacacatgttaactagctttgcaaagattctaaatgtcacagatacaaaacttttgatttaaaaaaaaaatcgtgtaataatgcgcttctttcacatattatttcaaatcttaagaggacaattgtgatattttcacttcttaaggttagtgagatggagctcaaaattaaattagtccatttccaagggcctcccgccctaagcaggctcctgt

SEQ ID NO: 51950 - DNA, 407 bp, Mus musculus
  source 1..407: mol_type = other DNA
acacacaatgaattttactctgtgggtttagtaggatgcgttctgaataagtttagatgaacttcaaattcaatacattcagtgaagaatttgtcttgtcctagagagaatgtctgcactgtcgggcgcgcagcagccaaagtgatgcgggcggcttgagtcggcctgagtctgaacaaagggagccagcggcccagaggatgctgtgcttctcacactccacccagctgcctggcgcgcaggtagcccggctcagagggctgtgtgttcgaagccagcacacaaactgcccaccaccggcggccggtggcattccagaggccaccaccgggacattcctgtgcccgggtgccaggtacttggcacgcctttttaggcagccgcgccgccccacgcagcggagtcga

SEQ ID NO: 51951 - DNA, 423 bp, Mus musculus
  source 1..423: mol_type = other DNA
tccatagatagatagatagatagatagatagatagatagatagatagatagatagatagatagcaattagctggttacaaaccttccagtaacaggtctataaatccagtctaagatgggagctagtctgcaggttagcctagagagtgtttcactgtttaatagactggctcagtagatttaaaaggttgcagaagcagccccctctacaatatattcaaatcctgtcacagaatactagatatgtagtatgctagaaatgtagtgctagatatatatgcatgcaaaagatctaaaccttaaagaactagtctaaaccttcctaacatgtttctacaaaaaacaagactctcacagagacaaggcccttaactgagcttgcatgtggacacctcaaggcggggtttggaagcttccagttgc

SEQ ID NO: 51952 - DNA, 396 bp, Mus musculus
  source 1..396: mol_type = other DNA
agcctgtgttcctcttgagtacagaattccaaattcaaggtgcaatttgggcccggatgcagctatctttcttgaagaacaaagtgatcaagaaagctgacagccagtggccttgcagccacttgacttatcctggaggaagtctccctgaaccaggagttcagtctccagacttcaaattgacttctagtgctggattcttaagatcaataatttaatgttctggtgtacttaaaatcgattttcctaatagcgactgattcaggcattaccctgttttaacagtgagaatgctgggcctcagactcctggggtgagctcccacctcctccatcaggcttgagctgtggggtcatttttgagctaaaactttgagtgaaattctcaggccgagat

SEQ ID NO: 51953 - DNA, 471 bp, Mus musculus
  source 1..471: mol_type = other DNA
gcagccctctgaaggctgctagcagaatgctgacccaggaagtcattttcttcaggataaatcttctaaagtgaaataatataagcttggtaatttacaggtgttatcataatattgaaaaatgtaaatcacctgctaaattctgctaaattcaccaagagctctgttggaactcaggaccacaactccttttgtgacctgggtctcagaacactttttagtcattttaatttatgaagtgaagagttttgctcaacacaatacaagtaaaattttggaaagatgttaagttacatggaaacataagtattaagtttgtgtatgaaggtaaatatgtcaccaaatactaaacattccagtactgtaacagtcgcacatcagtcattttcaagtctggcacaaaaatgaaaagcatgcattaatggatacaatgtgtagactgttttgtgatgaaataattcacctgctgac

SEQ ID NO: 51954 - DNA, 644 bp, Mus musculus
  source 1..644: mol_type = other DNA
gcatacaatcccatcatttttgtcaattaacagttacaattaacacattaatgttgcgtagtttaaaagaatgaacaaaagaccttcattttcatcaatggaatttcaaaactttccccacttcctgaaaaaagtaaaatgaatagatgtagactcaatttaaactaatagtggaacattttgtgaaagataaaaaagttattctgtgtttaaaaatgccttttaacccgatacaaagggttcccaaataatcgtgataaacttttaaagcctacacactttttaaaatttaatttttaattaatttttttacactcgatatatttctatattctgaaattaatcattacaaagtttctaaactcatgacaatttttcatcactcaaaaatatagtaaagaacgataaatcttcagactaacaaaggattgttggtatttttcaacttgcctggcaatagcataatagccctaacgattaaaaaaacaacaaaacaacattgttatcttcgtctatttacatacttagattaacaaaatccatttattcaacaaaatagaatttggagtctcactcggaatagggttccaattgggaggagcttggccgaggccccgcctgcctttcgctgcacgagcaaaaag

SEQ ID NO: 51955 - DNA, 682 bp, Mus musculus
  source 1..682: mol_type = other DNA
gggtgctcttaatctctgtactactggaagttctaaaactgtcctgtggcaattgtttgaagaaggcattatattgacattttcactttttaaaacaaattgagaacaggaaataagtcaatttaaaggcagataacgctaattatttttgatttatgactgtaactagactcaaattacaagatgtagattttgttttgccagaaaaaaaaaagtgctttttcctggagtctagtggaatttaacaagatttttttctaacatgaacaaaacaagatgtcaggaattttttttattgttcaggaataagtagaaatatgtgagaattttctaaaagtagtcaattgttaagtgtccaaaaacatgttaattttcatcatactctctttaaatttcactggaaaacgttccattttaatcatgaatacttaaatatagagatcaacagcttctgcagtagtatttctcctgtgtattcctaggtaatgtattggttacatttactgtaagaattaattgagaattagagttgaggcttagttgaacttcacgaagtttggacttgtaaacatttaaaaagttttctgaggctcttcaatataatatgtcctaggcactgctgatctgctttacactagtaaaaggagaactaattagagttaggcaaactaacaagataagc

SEQ ID NO: 51956 - DNA, 374 bp, Mus musculus
  source 1..374: mol_type = other DNA
aacttttgatgtcctgactccacttcccaagtgctggcataatgagccagtgcaaccgcaatttagatgagtctttttaaaaatggatgatgcctggtgaatatcaaccaggaggtttaaatttgacctggattgcagcagagcagggacgactgtgcagtcctgcgtggatacattcatcctgaaacagaccgggcgcctgatggcatcggcaggtgatggcatctgatgacagaagtctctgcccgagagtaggcttgtggacctgcctgtacgctaacacgtctgagacagactgggaaccactgtgctgtgatacttcacagccctcggtgacttggggagagcacttccgttccctaatactaaaggtt

SEQ ID NO: 51957 - DNA, 404 bp, Mus musculus
  source 1..404: mol_type = other DNA
ttcttaataaccatccatgaactaatgtagcatcatagaatcattgttatcatttaacagtaattcataggttttatagtgactaatgactgatcctgtgtcagagtgaaatgtctctctctctcagtctcagtaatatgcattgtcctatatttgagagatttgtgcactgtgtacacacacattgcaaacatgcatgcgcacacatgcatgtacacagatgtaattgtgtgtgtgcatgtggaaatgtcattacttaagtatattttaaatgcaaatgaaaatgtctcagttactttactgatcttcagcgattttttcatagaaatccaagccaagacctaaaatgatatcgaattagaaattaacttttatctagtgcctaattacacgaattccctatg

SEQ ID NO: 51958 - DNA, 357 bp, Mus musculus
  source 1..357: mol_type = other DNA
gtgatgagtctttttttaaaaaatggatgatgcccggtgaatatcaaccaggaggtttaaatttgacctggataaaggtggatcactccacttgaggtaaccagcagagcagggacgactgtgcagtcctgcgcgcctgatggcatcggcaggtgatggcatctgatgacagaagtctctgcccgagagtaggcttgtggacctgcctgtacgtccgcgtctgggacagttctgtgcctgagcggaggccagggctgggaaccactgtgctgtgacacttcacagccctcggtgtcttccagatggatccgctagccagaatggggagagcacttccgttccctaatactaaaggtt

SEQ ID NO: 51959 - DNA, 607 bp, Mus musculus
  source 1..607: mol_type = other DNA
attcgtaatgccattaatactactaagcttataaccacagggctcttctgtatagccctggctgtcctggaactcactttgtagaccaggctggctttgaactcagaaatctgcctgccttataaccaccttaattttgataattaaaacaactcaaaacaattaaaacaattattattattggctgacataggaagccctgggtttctttatcctttcatgtatacttaaaaacacttaaaaaatcattattatttatcctttctattctttttttttaagatttatttatttatttatttatttatttatttattatatgtaagtacactgcacaccagaagaagatgtcagatctcattatgggttcttaaagcaattaaagcaaattttctttatttcttccttctaaggatattaagatttgtggaaatataactatattccctttctctttatataactggaattaacatcctttcctatgtatttaactttaactaaatgtataatttaaggatgaatgccacattaagctctctcagaattctcacagagcctgcattctaagaatctggctgatgtcttatccttaggatgagctctc

SEQ ID NO: 51960 - DNA, 280 bp, Mus musculus
  source 1..280: mol_type = other DNA
gagtctttttaaaaaatggttgatgcccggtgaatatcaaccaggaggtttaaatttgacctggtgcagcagagcagggacgactgcagtcctgctgcgcgcctggtggcatcagcaaatgatggcatctgatgacagaagtctctgccgagagtaggtttgtcgcgtctgggacagttctgtgcctgagcggagaccaggactgggaaccactgtgctgtgacacttcacagccctcggtggatggggagagcacttccgttccctaatactaaaggtt

SEQ ID NO: 51961 - DNA, 213 bp, Mus musculus
  source 1..213: mol_type = other DNA
atggctcagggcgtgaatcctatttctttaggtgaataaataattacagatgactctctcacaaattgaactcaaggccctagacacagacatcccacatgctaggatgacaaatggctattgttgggttctgagctctgctgaagggacacaagtgacctggagttcccagagacttcagcctcgttggccatcagccggaaggaaagctgc

SEQ ID NO: 51962 - DNA, 198 bp, Mus musculus
  source 1..198: mol_type = other DNA
aaattgaactcaaggccctagacacagacatcccacatgctaggatgacaaatggctattgttgggttctgagctctgctgaagggacacaagtgacctggagttcccagagacttcagcctcgttggccatcagccggaaggaaagctgcgctggtgacagaatcagggttcccgtcaccggcaggtccttccctgg

SEQ ID NO: 51963 - DNA, 275 bp, Mus musculus
  source 1..275: mol_type = other DNA
attgtcagcctggtgagttcctctctcataaaagaagctgagttcgagaccagcctggtctatccaggcttgcagtaagattgtttcaaatttaaggccaagctggactgcagagtctgctccaggccagcctgggcattcccgacacacagtgagactctgactcaaaaacagcattgttgatcagagttaggagagaaaatgttatcacacaggatccacatgtcccggaacctttatttcgggtttcaactaccggcacccggaagggaaga

SEQ ID NO: 51964 - DNA, 273 bp, Mus musculus
  source 1..273: mol_type = other DNA
gataagattctagacactggtggctacctgcactagggtaccacacaggcagggcaccatcccagggcaaaatctggccagtgaatctccttggggagaacaggctgggttactggcatgccaatgtccaaacccagcacctgaagagagacaactcccctcttgtacaactgtcatacgtgagtttacagtcagcctgggttaaagtgaatatagcccatcttctgtgtacagtcatgatgtagacatctctgcaaaaggtttcggatatta

SEQ ID NO: 51965 - DNA, 264 bp, Mus musculus
  source 1..264: mol_type = other DNA
ctttttctgttcttacacgcgcaggcgcgctaacatacacaggcgcccgcgccccaatggaggctctgaggcgacagaaagtcaagtgccgtttgattctgccttgaccacagagcacagtggacaagaggatgaccgctctctctgtgagccaccagtggggtggcttgagtttcgctccacacacaaagcaggccagcctgggctactagcagtaactcttgctgtcaatgcctcccctccccctcgcccggcacaaagcga

SEQ ID NO: 51966 - DNA, 354 bp, Mus musculus
  source 1..354: mol_type = other DNA
gtgaatgaagtggtcttaacctgtccaggccaagtctgcctcttacaggttctcatggcacctacttccagcctcagccccactcggccaatactgtaatagttgattaaagaccctggggttgatgaagccccaggctggtggtcctcaaccttccaaaatttttctttcatacccataattttgctactgttatgaatcataacgtaaatatttttgtccccaatgtggttgagaaactctgcctcagcctttgccggaactctttagataaatatgtctagccctgcgaccataatggctctattctggttggttgtacaagcagtaagtggcgcaccctgggtgccaatt

SEQ ID NO: 51967 - DNA, 220 bp, Mus musculus
  source 1..220: mol_type = other DNA
aaaagaatgattctcattactcaacaaaggcccagggccttgggcgcctactgattacacgtgaacgccgatttgagttaaccctagaaaggctaaagctggccaggctcagactagccatcgctgctgtaggctgagggcctaagggagtatagtccccctcacagggatcaaagttgcaacctagtagctggtggtgtgtccccgcgcggggaggagc

SEQ ID NO: 51968 - DNA, 214 bp, Mus musculus
  source 1..214: mol_type = other DNA
tctggtgtgtctgagacagtgagtgtacacacacacacacacacacacacataaataaataaatattttttaaaaaaactgggccagcagggctattgtaaatgtaaccaaaaaaataaattaattgatctatatattgagtgtgttcccgtgtttttccgctcccgaaaaaaaaaaaaaaaagaagaactaccgggattccagccgacagctg

SEQ ID NO: 51969 - DNA, 284 bp, Mus musculus
  source 1..284: mol_type = other DNA
agctttgtgcatttttggatctaatggttggcaaaactaataaaattattaacagcctgggtagcccacaagctgctttatctctgtctcttgcacagtcacagtgattctgatctagatgatggctgtttttcacatgaacagtagtgttctaaaaagcctgagcatccaactttttgttgtgtgtacacaccacacgagggtcttaagggaggcgagcctgtcgccccggcaacggcgtccgcagacaggaagatggcgccccgcccgcgcgaggtgctgca

SEQ ID NO: 51970 - DNA, 352 bp, Mus musculus
  source 1..352: mol_type = other DNA
aactattttgaaaatatgtttcgtcatccttggttatacagtaagtttgaggcttagcctgggttatgaagaaggaaataaaggactctcttttctagttgtatccttcatattaatttttaagttatggcagacagctagctatgagcaagcacacaaataaaatattaattaattaaaactgacttttggctttatggactctagagggagctgcatcatgcgtacacgcgcacgtacacagatttgggagggttctttctgtcctccagggggcgcgcacgcgcagagaggcggagcgcgcgcagtatcccggccgcgcgtgcgcgctagccggccgaggtggcttcgg

SEQ ID NO: 51971 - DNA, 547 bp, Mus musculus
  source 1..547: mol_type = other DNA
ggccggctgaaaaacatttttttatacatcgtatagatccacctgcttgtaaatcccaagtactaggattaaaagcatgactcaatttttttcatttaatattcttcaaagtaatttacacgaaaagaaggaatatatggttgaaaagatttataattttacaatagaaaaacattcctaattttaaaataaagcaaattgttaatttattaaaaagtggttcatcatttcaaaaatgaaatgcccagctgtaacatttttagaatgttcaaggccagcctggtctacacctgtctcgaaaaaaaattatagttaaaagagaaattaatgcaagaaataaaattaaaggaagtaattctctaattacaatggctactttccttccaatgggtaatttcaagttgtcactactaatctaaaattgacatttcttaggatcaatagaaatgcagatctctcctgaaccgccggaaaggaggtcacgtgacgcaagctcctccaatcggcgcgcgggccgcggtggttgccgcggttcccgccaaatacg

SEQ ID NO: 51972 - DNA, 182 bp, Mus musculus
  source 1..182: mol_type = other DNA
tgaggtccaggccagcctggtccacaaaaatatgtaatgtattatagacaacaaaaaaaaaaaaaattttcattggtcgagctatagccaatgggcgcgcgcgtctctgtggtcatgagcgacggcgacggcggcccctagccaagggagggcgggacttccggtcgtgctcaataagtaga

SEQ ID NO: 51973 - DNA, 447 bp, Mus musculus
  source 1..447: mol_type = other DNA
ctgtgctcttaggtaccaaggacaccgtgaccacggggctcacagaccagcaagaacatcctgatggacagggccacaggagccattactgcaagcatatgcttataggcatgaaggacacccatgaacatggtcttctgtgctggccaagcagcttctcagacaaatatggcttggggcatgtcacagagcccagagctgacaccaaaacccttgtgtctggtatctgcctgcgcagctaccaggtcagtggaggagtgtggtcagctggctgccacaggctttgctgcacttctgatgagttgaaagggctgggtgatatctttcagggtgcccttccctatcacgggtccctagagcctgggctttggtgagaccctatacccattctgggtgtctcaaggcacctttcagactgagtctcatcctccagctcagctggcagtc

SEQ ID NO: 51974 - DNA, 372 bp, Mus musculus
  source 1..372: mol_type = other DNA
cactgtgcccagtcacttcaccgatggcctgcttggcatacagggagttcaggggctgtctgaatcctgcctgtggggcctcaggcccaggatgctcccctcacactagttcctttcagtagagggacatactactgcctgagtgactactgatcacatttagacaaatgtttcctaagtgtcttatgtgtgccaggcactatcctgggcacactatataaacaggatgactgcatgaccggcctgttagtcactgggccttcaccacaccgcctgtgcgggcaggcatgtgacaccccccccctccctgctctctggccgcctgcctgggccagccaggcccacaccctccccagaccctataaggcttgg

SEQ ID NO: 51975 - DNA, 282 bp, Mus musculus
  source 1..282: mol_type = other DNA
cagtcctagtctgaggtcagccatggtgactggaccaggattcagcgtccctgagccgctatggcaaccatggcgcctgtggggggcggggaagctccagatccacccccggcggcgcctcattggctcgcgtgcggaggccccacccagacctgctataaggaccgggatctgagctctgcacccaggtgagggcgcaggccacaggcacagcaggtggcaggacccttggcccagtgggcccgggcccaggacccagttgggcggggcccaggcgcaggg

SEQ ID NO: 51976 - DNA, 280 bp, Mus musculus
  source 1..280: mol_type = other DNA
ggtgtaatggtacatgcctgtaatttttgagcctgtgcaagtgtgtgtgcacatcacacataaaaggcaaattcatagccttgaaatgcattttgctgttgttaatgagatgacatgtgaggtgtgtcttcacaacagacatactcttgatcagagccaggcattgctccttgttcagtaggaaagcaaacaacacatcaggtgttcaagaccagagatttttttttttccggccacccacagtcactgccaggaagggatgtagcaatgcggccctggg

SEQ ID NO: 51977 - DNA, 242 bp, Mus musculus
  source 1..242: mol_type = other DNA
gtcagccgagcacccacagatctgggttcacgcccagcaccacataaacatgtgtggtgtggcacatctgttcttgacagtcctagtctgaggtcagccatggtgactggaccaggattcagcgtccctgagccgctatggcaaccatggcgcctgtggggggcggggaagctccagatccacccccggcggcgcctcattggctcgcgtgcggaggccccacccagacctgctataaggac

SEQ ID NO: 51978 - DNA, 434 bp, Mus musculus
  source 1..434: mol_type = other DNA
caaagagcggacgcggcgctcgcaggcgccccctcgtgtccacagtgtgagggcagggaggacattcacaccgtccagtgcggtgccatggaagggctttggcatgcagggatgctgcagcgtgtctgagacgggttagaaccccgagttcggaacatagtaagattttgtctcaaaacattctatatttattataacccagagttcctcaaagcagctcctgtggtggctgagtctggagctagagtctggaccttgtccccggaagaaaatgtgggttgagccgctcccttcccctcaagtccccccagtgatggactgggaaggagtgccccctcccccgcgcccccccccccgtgatgggctgggggcgtggtctggagcctagaatccccaatgagggccgcagtgcagaggtcagcctcctggaatct

SEQ ID NO: 51979 - DNA, 672 bp, Mus musculus
  source 1..672: mol_type = other DNA
tttgccggacaaattggtctgcctcagtttctccacagaagctgtgtctggctgatatgcggcaaagctgatgggccacagtgaggtctcagcctgtcgccacagtggtgacaccaaggagtctgctccagcccctcagggtgtgcacaggtcagagttaaaatcctgacacccacagatttggctgtcccgggcagctcacagtcccaacctttggttctggatgggcttcagggcgaccctgtgagcaggattcaactccacacacaattacaaaagcagttgtgtggtgcttactgtatactggaggtgccatcagtatacttactgtattctgaggcaatgcctagcaggcatggaaagagatatcttgctgtcccaatgtcccggcctttagcctagactccccaggagagtctgtcttagtcaatcaatcattataaataaaaaatgagaccttcatgagccaccaggaccgtgggaccacgtccatgaggttcctgaattgggaattcactagaatataccagaaaacatctatggagtgcctacggtatactggagatgcccagagtcagaacagcgcccagctcagtgcgggagtcggtggtctaaggatggtggaggcgccccctcccgtccgtgcgcgaagctccgagctcgggcgctggg

SEQ ID NO: 51980 - DNA, 446 bp, Mus musculus
  source 1..446: mol_type = other DNA
cttgtaagttcctggcccagagcacagacaatctgaaaaagcctggatgctgtgcagggccatccaggcacaggagtgtgggaatcactcccagactgattttccaggtctcacagctgccccctgggaggtagctggccctgtctggcctctgtcagggaggtcatcacagtaccccaaaattgttgcaaggcaaatgttggggtgcatttgtcatgggagtcccaggtgacactctaactacctagtgggtaaactgagacccgctcagagggatgcaggtgtctcgcggaggcgcggcatcccttgcgctgggcacccagcgccggcgctattccggaggaatctcccggccgcagaccacgcctggcagaggcttgctggagggggcgagccctttctcgggggcgtggcctcctagccagcggccgggctcagatccagcg

SEQ ID NO: 51981 - DNA, 460 bp, Mus musculus
  source 1..460: mol_type = other DNA
cggaagaattcacttttaaagtattgctattattatattattttcatgtctgtctgtgtaccacatgcatacctggtacctgcaggcaccatgtgggtgctgggcttcaaatcttggtcctctatagaacagccagtgctcttaattgctgctcacaataaaatatttttgaaaaatatgccgggaagtatatgtatggtggaggcctacgccttaatctcagcactcaggtggcagagtcaggcagatctctgagttcccggctagcctggagagatttccaaagtgaaataaaccatatttattaacaaatggataatctaacaagtgagtccgggagcccatttctgtgtgcatcacgtgaagtcgagtcccgccccaccatggcagccaaatcgggcggggcgacgttgtcaccgttcggcgctgacgtgtcccgcgcgtgtcactccacgttcgc

SEQ ID NO: 51982 - DNA, 336 bp, Mus musculus
  source 1..336: mol_type = other DNA
aaaagctctttagaggcttatgtcccagcactcaggccttaactccagtaagagcactgactgctcttcacatggtggcagtgtacttaggtgtacttagatataataataaatttaaaaaaattaaaaggatgtcacacgtggcaagagttcgaggccagcctggtctacagagtgagttccaggacagccagggctagctttcttagatatttttaataggccagcagaactgatcccgtccacgctcctgagcattgtccatctgcttctgcagctcaacttccgggtcaaaggaggcgcagctggcgggtccccccggtgtccgccgccttc

SEQ ID NO: 51983 - DNA, 244 bp, Mus musculus
  source 1..244: mol_type = other DNA
cgccatccggctgagggactcggagcagagttcggcttcaacccggcccctggcagtgccaagctctccaacgagatgtcaatccaactttaaatctcaagttctttttatttttaaaaagagtttttctctcaattatatatataattattattattttaaaacactgtagaccaagctttgaactccttgtgtagccaaagatgatcttgaagtttttgttgttctgatatgatatgacaac

SEQ ID NO: 51984 - DNA, 238 bp, Mus musculus
  source 1..238: mol_type = other DNA
agctcaagatcttacactcggcgcgcgccccctgctggtcagcaagtagtccgcaaaggaggcggaggcccattcatttcctgcctgcgcctgggtcgtccgcaagggccgccgagccttgcccgacccacggcgctgtgggaagcgaagacatgaatgacagaactcaggatgctagagtctgtgtcagtgacagtaaccggaagtatgtcatatactcagggtcacatacaacttg

SEQ ID NO: 51985 - DNA, 411 bp, Mus musculus
  source 1..411: mol_type = other DNA
ttttatcagttttaaaacataagagcactggctactctcatcagatgtggctcacaaccgactgtaatgagatctgatgccgtaaaataaataaataaagctttaaagtatgcctgtaattctagctgagctacccagaaatctccgacaaatctttgtgttgtgtctctgtggcaagttgacctacattcatacatgcctgcatgcacatacatacacagtaaagaattaaaaatatttacaacctaacagttgtataaaaccttagtgtgagtcatcaggttcccagtgcacttagacatggtgctttgcgaatccctgcctagttccacgtggcgccaggacaccccccctacccccccccccagacccggaagggaggaaggggcggaaccgaacgctccctcctcc

SEQ ID NO: 51986 - DNA, 409 bp, Mus musculus
  source 1..409: mol_type = other DNA
caggttggcctgggactcacagagaccccctctccaacatactctttaaggagagagaaagagcaagaggtctctgtcttgaacacacagggttgaacacacagggacatttgtacaaatgggcacagctgtgggaacagtgtcaactgtctggtcacatggaagaagactgcgtcacaaccacccagagttaggggttctaaaggcataattaggaatggagcccctgcctagaatcccccctaccccattaggggctgaggggtgtggctaggggtggattcctacctagaaccccccagtaagggggctgacttctccagcaccacagggtcagtcagcagttggggcggagctagggtgagctaggccccaccttggaccttgctgacggggccctgagagggct

SEQ ID NO: 51987 - DNA, 246 bp, Mus musculus
  source 1..246: mol_type = other DNA
gggcgcagtcgcgagcagggcgccacctggtggcaacatgccccatcccgccactgcccctgtgaaggcgccagtaaggtgggtcctctccaggcctggctcacatccgtgcatgcgcagttgcaaatgcccgtgcacattttcacaactgcagggcctcagtgccctcgtccagaggacttgggaagcctctctaaggtctctggaaacatgggaggattcaaggaccccagggggatgcacaag

SEQ ID NO: 51988 - DNA, 155 bp, Mus musculus
  source 1..155: mol_type = other DNA
cactgtgttggaattaaaggcatactagttcttttactttaaggttaatcttaatttgtaaaataccccaagttctaaggggtctcataatgatctaggcgcacaacttgtattcatacgaattgagtgaactcgggggatggggaggatgagtc

SEQ ID NO: 51989 - DNA, 242 bp, Mus musculus
  source 1..242: mol_type = other DNA
cagcccccacgtggccactggtcacttctgacctcatgacttctttcccagagatggcaaatgcttgcctcacaagcagttggcacagatgcgcgcgcgccgtggagggggcagggaggccctgcacgcctggacagcttgctgaccggcagggtgcatctgtagtggcacccctcaagttcccctaggggatatgaatcccaagagccctccccacccaattggggtggaagtctcccgca

SEQ ID NO: 51990 - DNA, 383 bp, Mus musculus
  source 1..383: mol_type = other DNA
tgggtcacccagccgcagagccctagcctagaacgtggcacgcggggcaccaacccttctcacacaaggctgcgggggcttaggcgcactacgttgacggcccgggtcgtgggggggagctttgcaaaactttcccgcgcgtgggggagatctgcagagggccattgcccacgcgtgggttccacacctcttgtaagaggaatccgagttgtgtcctccttcccgcgcgtggctcggggcattgcacagccactgcgcatgcagaggaatccgcgttcgcgggaaacgcgtggggtccggcggggaagtgcacgcggctccacgcctaagagcggtcgcgcccgagtcgggtttcgcgcgcggcccgcatgcctccaggcgcc

SEQ ID NO: 51991 - DNA, 437 bp, Mus musculus
  source 1..437: mol_type = other DNA
taaaaatttaaaattataaatgcatccttcacatcgcacaatgaagagatggagctggaatttgggtgcccaggcctccaatttgcaattgaatcctcttcgcacatatggaacgcttttgagatcctcttaccctagttcttttgcaaagctgggctcaaattctgactctagatctagaactactgggtttcgaaccactgtctccggacccagagctgatgttgtgcaggaaatcacgtactcagcagccgcagctcggggctatcctacacccgaccgcagccggattggctgtgccggtcactaggcacgtgagtgggtgccggcacgtccttgcctgctcccgccccaggtcgcggagggcggggccgctggagctgtcagccgccaccaatcagcgtgcgggcgtgggctgaatgcccaatggcggctcc

SEQ ID NO: 51992 - DNA, 692 bp, Mus musculus
  source 1..692: mol_type = other DNA
aggtagatacctatccactgcacagcctctggctccacaggttttagaggccaggcactgctggccctgatatcccctctcagcaagtctttgcttaaaggaagtccttcctaaaatgtacctttaaaaactagaccttaaggacttcaagggtgggtccctgcgcagaaatccctcagtgaggggctgccttctccctccacagtgctgggccgccccaccctgtcggtgcagcagacccccgagggcagcctgctggcgcgctgggagccccccgcggacgcggccgaggacccggtgcttggctaccgcctgcagtttgggcgcgaagacgcggccccggccacgttggagctggctgcgtgggagcggcggttcgcggcgcctgcacacaagggcgccacctatgtgttccggctggcagcgcggggccgcgcggggttgggcgaggaggccgcggcagcgctgagcatccccgaggacgctccgcgcggcttcccgcagatcttgggcgccgcgggcaacgtgtccgcgggctccgtgctactgcgctggctgccacccgtgcccgccgagcgcaacggcgccatcatcaagtacacggtgtccgtgcgggaggccggcgcccctgggcccgcgaccgagacggagctggcggcggccgcccagccgggggccgagacagcgctcac

SEQ ID NO: 51993 - DNA, 313 bp, Mus musculus
  source 1..313: mol_type = other DNA
aggtataccgcattttggagcatagaggagggattcctctaccatccaccaggcttgaagcaggctaggcggcgctcagagggagtcggaggcaacatctgtttccaatctgacccacggcgagcatttgggcaccaggttcggcttggggctcctggaccatccggctcatgacagtaccgctggtcggaggtgccatcccccaagagccaggcctctgggacgaggctcagtacgcttaccgtggaggctcggcctaccctaggcggcttccttagaagctatgcttttagacaggcggactcaggccagg

SEQ ID NO: 51994 - DNA, 421 bp, Mus musculus
  source 1..421: mol_type = other DNA
tccagctctgggccggaataaacaaaatcgtttcgttatttgagggtctcaggtgcagtccacactcgactcacacttgcagcagccataggagtcagattcctccttccacaaaacttttaaaaaattttttttaatgcgctgttcaaaaacgacgtcctccttcagcctcttcagccagcaaggcgggcttgataggctcaggtcatcctcagtgtaacttgaggccagcatgggcaggccgggccacgtgtcccacgtcccacgtgctccccgggccttctacaggctcctgaagcacgtgacccagcagcgcctcctcactgggcaggcatctgcgcgcaggcgcagtactgtacacggccaggccccagggccgcggcggcggaaggggtgacgtcaccggctgggggcgcgcgag

SEQ ID NO: 51995 - DNA, 364 bp, Mus musculus
  source 1..364: mol_type = other DNA
cacccaagcagagacagcgcatgtccctgcctctgaacttcatgccaggcatctagttcaaggaaggcaaagaatccttgtagttgtttccttttgggagggtggatccccttaccaaaatacaagtgatgagcccagccaatcggagccccgagtccgtatggccacgccacaagcccacagctgacgggagcaacagcattctgcttccctggggtggtgagaatgccaagttagactcagtttccctgttcatgaacatgacaatgacgtcataaaggtcgtcctcagaacttgtctcctggacatcatgtggctgtcgccgggagcctcttccgcttgaggcccccgagttcggccacag

SEQ ID NO: 51996 - DNA, 658 bp, Mus musculus
  source 1..658: mol_type = other DNA
catcgctgggggcgtcgagattcgaatccttgcacccggcgcccgcggagccccagtattagcgcccagcgcgaaggccaacgggccactccgggcccggcggtgggtgtcgccatggcgaccatggggttcccccccgcggttgccgctcgagtcgaggttccgcttcttcagctccgcccgcaggtcgatcacccgcaggtcgctgagccgccgcgtcccggtctctgacgccgcggagctcacggccgccgcgcccgccgcactcgcgtctccacagagtctccgccattccagggaccctggttccacacagaaccgggtggcgccgcctgagagggaaccgcttcagcctccccggaggcgcacctcgacactgcgcaggcgccgccggcgcgagccctacgctctcagacgcctttacccaagcgcagtgtgcgcggcggcagagacgacgtaggcgcgcctcgccggctcgcgcttggccgcggaccaagacgcatgcgtgctacaggtcgtgcgcctgcgcatcactgtcggagcgctggccgtagagcggtggcgtgcgcagccgggcaacgctgcgaggcgcatgtgcacttgtacccgcgagacctaggaggtgcgtcagagctgtgcgcctgcgcagccgcaaagg

SEQ ID NO: 51997 - DNA, 485 bp, Mus musculus
  source 1..485: mol_type = other DNA
gcccggcttcctgcaaatcccggggttcgactgcgaagtccggggtgggaaggccggcccgagtctgcgcgggcagttacgtgcccgggtccacggcggtcgatcacccgcaggtcgctgagccgccgcgtcccactctccgaggcgcccggaccaaaggcggggtcgcccgacccggtcccgggttccgccatccactcgctggcaccagctgtggcggctcggcctttgcggctgcgcaggcgcacagctctgacgcacctcctaggtctcgcgggtacaagtgcacatgcgcctcgcagcgttgcccggctgcgcacgccaccgctctacggccagcgctccgacagtgatgcgcaggcgcacgacctgtagcacgcatgcgtcttggtccgcggccaagcgcgagccggcgaggcgcgcctacgtcgtctctgccgccgcgcacactgcgcttgggtaaaggcgtctgagagcgtagggct

SEQ ID NO: 51998 - DNA, 281 bp, Mus musculus
  source 1..281: mol_type = other DNA
tttaaggtttcaaaagcccacacaataccctagctcgttacgatggtcatggtcctctgaaactggaagcagaaaacttttccgccatggtgctttgtcaggacaactgagaagtttacaaggcatccatgcatccatggtgcacatctgctcaacgcaccccagtgtggctccttgtacgcgccttggccttggcaagtcactaggcctgcttctctggaacaatccagtaaccctaggcttgaattctccgcgcgggcgcggggaatcccccgagggct

SEQ ID NO: 51999 - DNA, 542 bp, Mus musculus
  source 1..542: mol_type = other DNA
tacagctcagctgctggagcacttgggtgttacacgcctgtcattatcaggacagcctgaaacagttcataaggatcagtctattgatccggacagatttgtgacagatcgatccggaaccacggagttctgtaaactgacttctgacctctggcacatgctctctctctttcgagacagggtttctctgtgtagccctggctgtcctggaactcactctgtagaccaggctggcctcgaactcagaacaaaaaattttaaaagcactctttaaagtcatttttaaaaagatttgtttatttaattagttattatgtatacagcggtctcctaccatcaggcaaaatgagggcaccagatctcattatagatggttattagccaccatgtggtgacagggctcttaacctctgagacatctccacttttattgtcagagattaaattacttcgaggtctcacgggtgccgtagaacctccggccaccagaggtcgcccgcagcgcgcctgtctctctagccggaaaggcctgcaagtggcat

SEQ ID NO: 52000 - DNA, 190 bp, Mus musculus
  source 1..190: mol_type = other DNA
ggcatgcatcgtaagtgcctcacggaccagcaggcgcacctgcgcacggcctttagcatgcatactatacggttgtgtatcagtaaaaccttttggaactgggaggggccacgcttcttccaggcccccttccagtctggagtcaccgcttgatgaaggaccgaagcacgcgagcgtcatcacgtgcgca

SEQ ID NO: 52001 - DNA, 212 bp, Mus musculus
  source 1..212: mol_type = other DNA
tccttcatcaagcggtgactccagactggaagggggcctggaagaagcgtggcccctcccagttccaaaaggttttactgatacacaaccgtatagtatgcatgctaaaggccgtgcgcaggtgcgcctgctggtccgtgaggcacttacgatgcatgcctttgaaatgtgacaaggccttcttacctggtgcgcgtgcccagacaagaggc

SEQ ID NO: 52002 - DNA, 403 bp, Mus musculus
  source 1..403: mol_type = other DNA
agggtttctctgtatagccctggctgtccgtgctgggattaaaggcgtacgccaccacgcctggcctgagttcttaagcactcatacacaaatacatcttttcttattacttattgaccaggctgtcagggcctggcttctgattcagggacatgggccagcacgtctctcctgcgcatgcgtggggctcggactggcgctgcctgtgcgcatgcgtgccacgctagccacaccctcttccctttgcgggcgggaagaggcgggcggagagccgttactgcgcaggcgcgcggccggagctctagcgggtgcgagcttccctcctcctcacaccggcgctggcttatgggatgcgcaggcgcagctcccagcagaaagccctcggagcccgggggccgggcgc

SEQ ID NO: 52003 - DNA, 208 bp, Mus musculus
  source 1..208: mol_type = other DNA
gctggagagatggctctctctcagtcctggagaaatagaaaatcactttaaatcatttaaaaataagagcaaattaatgcagtcttgccaaggcaacccagccattgcgccccggcgccccagggacctccgcgcgcccggccgactctcgcgaggtttccagcgcgcaactttattgaacgccttggacgcagacaaggcgtgcgcg

SEQ ID NO: 52004 - DNA, 238 bp, Mus musculus
  source 1..238: mol_type = other DNA
actctcgcgaggtttccagcgcgcaactttattgaacgccttggacgcagacaaggcgtgcgcgcatgcgcgcagtgcaggtttgtacccggtccacaagtgaatctggacagagacgcccgtgcactgtcaggctagtgaggggcgtggccgcacttagtcctgcccctggtagaaacggaagcacacgccttcctccggggggcgtgtgcagcggcagcctgcgggcgtgacccga

SEQ ID NO: 52005 - DNA, 276 bp, Mus musculus
  source 1..276: mol_type = other DNA
atggcccccggctgccgtgcaggccccaccccgccctgtcgggtcacgcccgcaggctgccgctgcacacgccccccggaggaaggcgtgtgcttccgtttctaccaggggcaggactaagtgcggccacgcccctcactagcctgacagtgcacgggcgtctctgtccagattcacttgtggaccgggtacaaacctgcactgcgcgcatgcgcgcacgccttgtctgcgtccaaggcgttcaataaagttgcgcgctggaaacctcgcgagagt

SEQ ID NO: 52006 - DNA, 336 bp, Mus musculus
  source 1..336: mol_type = other DNA
agcctcaaccctggtttctcggcaaccaggtgtggcaggggcgtggccacagtaggtctcgccccacccaccccatctctgagtgaccgggccccgctagggggcgcttgcgcccccgcccccccgctcccaatggtgctctgaggggcaggatggtgggatcttcaattttacataatctaggttatctaagagactgaacttagtttgtggatcaaccaactgatcgatggagcactctcccggagcgcccctacagctgtgggcaggacgagggcggttcccgagcccgggaaaccctaaggccacgccccctcgagcccagccggcctgagg

SEQ ID NO: 52007 - DNA, 348 bp, Mus musculus
  source 1..348: mol_type = other DNA
aggctggcctcagccagggctatacagagaaaccctggttcttacatgtttaagcacatttttattaaaatagtaattggctcaaggggctgagttcaatcccgggaccgacatggggatgcagggacccccgccccccatgtaaatgtcactttcaaagtaacgctgtaattcaaattgcgcgtttatgggccacagtggctcacgaagggcactgtcaaaggacagcgtgtcccttctctgagtagagaccaggctcgggctgcggttttttattataaaataacagactcgtttgtgagtaggtgagtgtgagctgcacccacacccacaccccccgcccccacg

SEQ ID NO: 52008 - DNA, 419 bp, Mus musculus
  source 1..419: mol_type = other DNA
cgagcgcctggacatcctgagggacttcactcactgggctccgacacacagggcgtggagcggacccggcgcgcagctagggtaagagatcggagccttgggcctcctcaggcccacaggtatgtgcccgtgggcctgctcgagcgagacactgatggccagccagcaggctgcagactggattcgcatcacagaccagggctctgcgagttgatgctgggaggcccaggcctgacctgtccgagatgctgcttggaccagtacctcctggcttcgtcttccaatacagacaataaatattattcttctatcatttcttttatttgaactcctggaatcctaggctcaagacagggttgctctgtgtaaaccaggctggcctcctggctcagggagcagagggagtcacctcttgccca

SEQ ID NO: 52009 - DNA, 284 bp, Mus musculus
  source 1..284: mol_type = other DNA
ccacgatggcaacatgacccaaggtccccttctggtcctcacagtgtaaatgcatgtgcatatggcaaggagtttgacaggcatgtgccatgccattcatgtgatgcttggaatcccagacctatttctatcgaatgtaatgcacagtgctcaacactggagctggaaaaactgttcaagcacatacagatatctgaatgaatgaatgaatgaatgaatgaatgaatagatgaggtgaaggaagcttacaatccccttccccagggagtacttttctcctgagg

SEQ ID NO: 52010 - DNA, 442 bp, Mus musculus
  source 1..442: mol_type = other DNA
agcccaaattacccatgttcactggtgcaattggacgttcaatgaatgaatgaatgaatgaatgaatggagctattgtgtcatcccaccaaaatataagctttatgaagagtccacattgagacctgtatatatatatgaaagaggaggcttctgctcttgcagaggacccgggatcggtccctgctcaaagcagacggtcagggggtcttcatgcgcattgcatgcacacgcatagacaacaatctttaaaaaaaaagttttcagtttgtgaggccagagtctgctgctccccttagacggtgagcgcctccggtctagcggaatcaccttcccgggagccgcgcgcctcccgccaggccccgccccaatggggagatcgcccgccctccccgaggccgttggaggcgggcatgggcgggccgcagcttggtaaccgttgc

SEQ ID NO: 52011 - DNA, 292 bp, Mus musculus
  source 1..292: mol_type = other DNA
gttttttaatatttatttatttattatatgtaagtacactgtagcagtagcccagcctacttgaaactcacagattaaaggtgtgtttgttatcgtattttaattaattatttatttatttaaattactcaacttatatatttttcaagaccaggctggccttgaattgtggatggcctgccagaccttaccttgtcttttgagacaaggccttcaccacttgggaggccagcagctgcctaaggcagcctcggtgccctaccgtgcacatctgccaggcctccagggccct

SEQ ID NO: 52012 - DNA, 513 bp, Mus musculus
  source 1..513: mol_type = other DNA
tatatccaagttctaggatgatagacatgtatctctgcacttggcttatagagtcttgaggctagaacccagggcttcatcgttctagcagagtgcttcagttgtcagtatccacagtctacggttgactactgactaccgttcacagaaagaagaaccacctccgacaagtttttttgtttgtttttgttttttaaaagcttacattttaaaaccctagccttcgccagcgctccctccctccgcagggcctttttagggacgtcccctctagagccgctcccggggcgcagtgcgcaggcaccgcgccacggcctggcccaacccctccacgtgcggcgcacacctcgcgccgctcagcagagctgcggcgccggctgactgtcgcccggcgggcccccaccagcccggaagtcccgccccacgcgcgggtctctggccttctgacaggctcggaggcttgtccatcggcgaggccgggcccgagtcggcggctgggggcccgcggtcgct

SEQ ID NO: 52013 - DNA, 259 bp, Mus musculus
  source 1..259: mol_type = other DNA
tggtggcttgcatctgaagacagctacagtgtacttatgaataataataaataaatctatatctaaatatctatatctatattatttttttaaaagagtttcccagaatctttgcacatggacagtaggcactgtctacctaccctccagttctcacccttggtgagcacctcgtgagcttcttcccgcgtgggcccatgggactaatacgcggctcggaagtggatgagccagtgactcccgcaaagcacgccgggtg

SEQ ID NO: 52014 - DNA, 251 bp, Mus musculus
  source 1..251: mol_type = other DNA
taccccaaagtcagtgggtagaaatatgatttcatgtctaccagaatctaccaccaactttgggttgatccgacactggtgactcaccaggtgacaaagtcctggcattttgttgcaggctccaaaagccagcccacatgacccactctttttagatttaacacaaaacatgggcaacatctgaaattcaggttagcctcaaactcaagggctgaccttggagtacgctctctgctaatagagccagtagc

SEQ ID NO: 52015 - DNA, 460 bp, Mus musculus
  source 1..460: mol_type = other DNA
acccctgtgttgagggaaaatcttcacccaacccaaggcttcgggcaggccacgggcaaggcctccccaagccaggctactggggcgctgacttaaggtctcctgccgcctggtagcgggttccaccccaatgcagatgcagaggggtcaatcattgaacgcttgcccttgtcgctcagccattggctcagaagtcagaggacaaggattcatgactgccaatcttagcaagcaccgcctcctaagtgtattcattagctggtgttgacgactcacgtgactgatcagagccgtcactctcatcctagagccgccccgagaaggtggaactcgcgcttcattgggcctccggatttacggcccacgattggcgggcgtagagtggtagccgtatactactggcctcggcgtccgtcaagccggtggcgggaggaggtgcccctcttccccctccgcgacc

SEQ ID NO: 52016 - DNA, 359 bp, Mus musculus
  source 1..359: mol_type = other DNA
agatgcctcccctactagacacatctgtggagtcagttgtttatgcaaagacagtcatggaatcagcctatctcatgcaggggttggtgtacacccccaggtagtggggatacttgcccatctcctctgcccagctggggcagcgtggactcgcacagacccatcccgcccgcaatgccggggtacgctggggccctgtctccaccctgcaccgagtagagtgggcctcggttgccatggcaactcggtttacgcttgcgcaagaggatcgagttcgcgtctaccaggagactccaacccaggatgctccgcggtgcctgcgtcgtgacgtcacgacgggcgtgtctacacgtgacttt

SEQ ID NO: 52017 - DNA, 373 bp, Mus musculus
  source 1..373: mol_type = other DNA
tgggaactgagcccaggtccagagcgctgactgctcttctgtgtctgaaacagtgtacttacatataataaataaataaataaataaataaataaataaataaataaataaataaataaatctttaagaaaaggaagcatttaaaaaaaaaaaaagaaagaatttttaaaagcatttttattgtatggagctcatctgctaggctctcttcctgccttgggagccggagtcaggaggaccaggaattcaaattcatccttaccttgagtttgagaaacaaagcaaatgaataaataactattggttaggtacggaaggcagggtcagccacgctgcctaccatcatgcttgtgagctcacaagcacttttgtg

SEQ ID NO: 52018 - DNA, 424 bp, Mus musculus
  source 1..424: mol_type = other DNA
cccgagtgaagtggcatgcgcaacgcactcaatgtgagccagacggacccttccccctgacttgtgggcgggacttcagcaggtgcaaccacagccgccggctgaggccccgcctccagagtagtggcgcgggagatactggtccgcgactccctttccaggcaggtctgcaaagagcagccttgggcgcggcccctttaagtgcctagcgggctgcgagctgcgggacaggaggccgcggcgggtcaaccgggaagccccgcctaggtagagcggaccgccgcagctagggcgtttctctctccgagtgtcaccaagaaaaggaggcgttttttcagaattcttaacttgaatttctgaagattacgaatccaattcctttgcccccagccccctcccccaagtaatgcgggtcggaggagga

SEQ ID NO: 52019 - DNA, 353 bp, Mus musculus
  source 1..353: mol_type = other DNA
tgtgcccatacatctgtggtgaacagctgcgcccctggcaggtggacctcatacggatgttcttcagtggtaaggccttccgttaagctagattcgcacagatgcacgggtttaatctaagcaggtgttctgattacactctgactacaagcctacatgtatctttctacaaaactagtcctgtacaggttgaaggcaggggttctggccccgagccacgctcccagccccccccccgccggggtatgcacccctggctctggcggcgcggccccgccctcttcgccccgcccctctcagccaggctcaggtgcacaagccggaagtgcgctctttgcccaggtgggttccgg

SEQ ID NO: 52020 - DNA, 432 bp, Mus musculus
  source 1..432: mol_type = other DNA
gcacgggtttaatctaagcaggtgttctgattacactctgactacaagcctacatgtatctttctacaaaactagtcctgtacaggttgaaggcaggggttctggccccgagccacgctcccagccccccccccgccggggtatgcacccctggctctggcggcgcggccccgccctcttcgccccgcccctctcagccaggctcaggtgcacaagccggaagtgcgctctttgcccaggtgggttccgggtcagacggagactcggggttccagctgggaacccgggattgggaacctgatggagtcaggtagggaggcagggcgcgcagcctgtcctgtccccacctcctccttcccttttcctggcccaagaatgcggtcggggcccttggcgccgagggcggggagcgcactccaagattgggttgcc

SEQ ID NO: 52021 - DNA, 189 bp, Mus musculus
  source 1..189: mol_type = other DNA
ccactggagctgaagttgtgaaccacccatgtggtgtttcaccaaggcaactcttatgtgggagcatggcagcatccaggcagaagactgtcttttttcaggcagctaggagaaagcagtaccggctgtgaagccaggacgcctgagttcctcacagagggtgggggcgggggcctcctttggctggga

SEQ ID NO: 52022 - DNA, 260 bp, Mus musculus
  source 1..260: mol_type = other DNA
ttgaacctatgctcagataaactcatgaacatacaagcatgtttcagattgtagatctcttgtaatcctagcattccagagattggaggcaggaaagccatgagttcaaggccagcctgggccatagagacctcctggggggtcaagagccttccagcgctcctcagccggtggagagcctggcctttccatccagtctctatgaaatcagagtggaaagaagcatcctaggcgggcccaggaggcggagcacgcgggtg

SEQ ID NO: 52023 - DNA, 193 bp, Mus musculus
  source 1..193: mol_type = other DNA
cagatctaaccagatctgtctccaaggtccagccttctgtttctggagtcctaagagactactggatgtccctagagtcctcgacatataaaactttaatgtgtcagtgttaaaccaaatcaaacacacacaccgggagtcgaggggcggagcgcggagcccgggaaccccgcggctgccctccctcccttcc

SEQ ID NO: 52024 - DNA, 263 bp, Mus musculus
  source 1..263: mol_type = other DNA
tttgacaatcaatagggtgcctgaagcccaaaggcattcatttatcccttggaggtgttggcagcagggcggccagcctcagctacataatcccagtcagctgggggtgagaattctcaattccccttgttcaacctccctgcgggacccgctggaaataaatcagggggcactcacggtttttggtaccttcattggggcgtccaactttggagcctgactgaagggaactgcggtgcaccctcgggagttctcccccaggt

SEQ ID NO: 52025 - DNA, 420 bp, Mus musculus
  source 1..420: mol_type = other DNA
tgggtggttgttgacaagctcatgtcaacaggcttcagggggacaggagtctcagcagtacttcccctggaaccctggttaggggttctgtggtcacagcattgccagccctgtgtcggggcgctggtgagtctccagtggacacacatatgaacacatctgaggttcatgtgtgcatgtgcagtgtgtgtgtgtgtgtgtgtccatatatggacctgcacacacatcaggaaatgcctgtgtgcttgttccagcacttgcagacacatatcagactgtgtgcacacatccaaccgtgcatctgtacaagcacctgcaacagaggcctctgcttgtcagcgcgtgcaaatgcaggtgcggtgcaagatgcttgcatggaacccacagaagctcctctgagggagtcacattttctggaaa

SEQ ID NO: 52026 - DNA, 297 bp, Mus musculus
  source 1..297: mol_type = other DNA
cagccgcaagagactctatatggcactgacatttcatacatgtgcacactcatacatttatgcacatatgtatatatacccacacatacacacacatggcacatacatacaggtgtgcataatcacacacacatgcacacatgcatgcaaatatgcacacacacatataaatacacacatgcacacatacacatgagtataaggtaggcatttgtatcaccttctccttagaagaagactttctctgaagagtaccctagagaagctggtgccatccacggcttcactctcaccctg

SEQ ID NO: 52027 - DNA, 408 bp, Mus musculus
  source 1..408: mol_type = other DNA
ttgactccagagtcattcagccaccctgagtgacagggtaggtaagcatgccccccggagggcgaacttctagggctgggactctgggctgggcctgttcagaactgtttagcacagtggtctccaccttctccaatcataaaattatttcattgctacttcacaactctaattttgctactgttctgaattgtaaggtaaatactgatacgcaggatatataatgcaatgccaaatgtgtctcgacccaccagccatccagaagtgctgggttactgggacccagctcactctagacttcaatggtctctggtgtaacaggtttagcttgcctagggttactcaccccaaggcttgttgccccaggtttgtgaaaaagcttaggaaactatgttgcgaaattttggg

SEQ ID NO: 52028 - DNA, 231 bp, Mus musculus
  source 1..231: mol_type = other DNA
acgcaagtgtcaaaacaccattgtgttgcgagccagtgctggaactgaggctccaataggccttggccccacctgctggtggctggtgggaagcttcgaagagttgcaagctacaactaggatccagcagctgggctcagctgctgcaaggttacgcctagggcggagtcttcaggtaggacctttttcggtggtctccacttcgctgaaaagtgggtaggccttatgtca

SEQ ID NO: 52029 - DNA, 253 bp, Mus musculus
  source 1..253: mol_type = other DNA
gtatatatatacacacacacacatatatatatgtaataaaagtgaaatggctttcaaagtagaatatattttctaatgtttattatagttctgactccgaatgagagtggactagatgtcccatctatggctgagcactcagtaatatgagttttggccccaaagcaattttggctgctgcaggggcaataggtggcaccttagttcagcagtaagctgtgagggcgtaactgcagatgctgctccccctccg

SEQ ID NO: 52030 - DNA, 322 bp, Mus musculus
  source 1..322: mol_type = other DNA
caccagcaggtggggccaaggcctattggagcctcagttccagcactggctcgcaacacaatggtgttttgacacttgcgttgggagccaacagggcctcttccctaggcgtgaaaggacttttatgattgggaggacccgaaatcctaagccccagggtcccagagacaacctgtcctctgtttctcagaggagacctggatgtgcatcctgggcaagatctcttgaccctttataaaaaagccctttaatggggggcggggcatcatctggactccgccctcagagccccccgctgggggctcggcagaggcctggcggc

SEQ ID NO: 52031 - DNA, 451 bp, Mus musculus
  source 1..451: mol_type = other DNA
cacatggagtcgcacactgtgtggccttaaagcctcactgtgtgagcatggtgtccttgaggacccactgtgtgagcatggtatccttgaggacccactgtgtgagcatggattgttctgttttttttaaacattgcattaaaatactactgatttatttcagtgtgtgcatgcatgtgtgtgtgcctgtgtatatgcatgtgtgtacctgtgtatgtgcacatgtgtgtgtatgttcatgtgtgtgtgtgtgtgtaggacagagaaaaacttgcaggagctggttctctttcccagggattgaactcaagtcctcaggcttggcagcaagctattagtttctaaagtgagctcagaagatggtcatctaccaaattccaggggtccccagaagcctgaacttcccttgtcatgactgactcaggtgtgtcggcgctgagggcatcctcac

SEQ ID NO: 52032 - DNA, 182 bp, Mus musculus
  source 1..182: mol_type = other DNA
ccacatcatctgcaggttgacatgatgacagaatttaattttcttagcagcaagctcatggatcctggtgataaatgcagcatgattagtggattgacttcactgttgtccacctctgatggggcaactcagcagaaagctgctgggctcagtctggctttgttgagcaacccacaaagcaa

SEQ ID NO: 52033 - DNA, 457 bp, Mus musculus
  source 1..457: mol_type = other DNA
gtgtgagactgtgggtcacattcacagccgggcagagagaaggccagtggctcctcctctgtctggtcagcccatagaatggtgtcaaccttacagtaacacgcataacagattacttaagggtaaaactattggtacactgactaaataatatcctgtataagtcttactatgagaataagcgatcagagagctctgtgaaatgctatccacaggctcaggtgtctatagacttgttccccagatggctcattaagtgagagagccttgaggccaggaagttttctggctggatcccttcaaatgaggctactagcctcccatgtctggttcctaagtggctaagaacttagtctcactggaagtaattattacataccatgagagccatggtaacttcaagaatgtctttgtggcatctttaaaaatgatgttcataatattaaaacaaaaaaca

SEQ ID NO: 52034 - DNA, 357 bp, Mus musculus
  source 1..357: mol_type = other DNA
tgcccactgtattaactgccaatagttgggcccttcattctctaacattagagtacaagtagaaatagttttatttatttaaaaattcgtttttagttaatttattttttacttaaaaattctaaacaattcaacatttcaaatattctctatatatgaaaatgggacttgaggtctagccttcccaactcatatgagcagtgaattacatcattaaatcccacaatgcatcattatatactaatggtgtgtttaaaaataagttattaggaccaattaagacggctaataatagactgattaagggacagtaaaccattcctgacattgcataagattaaatatgctaatcagatt

SEQ ID NO: 52035 - DNA, 453 bp, Mus musculus
  source 1..453: mol_type = other DNA
atatataagttattccaagagtcacataatttctgtagactttggagtaaaagcaagaatattgtgttgtaggtatcaaggaggagggattatggaatctccaaacatacctttatatggattacttaatagggtaggcagactctatagtggcattttataaaatgtgaagtggggcttttttcagagatgagagacctgcttaaggccacatatctaagtgacttgtgaatctaagtaaatttcactggagaaactgtgcagctaagtgaaagatcacagttttgttttaatattttaaattactttaaaacttcaatataaaaaagaccaatcctaatttaatgtgtgatcagacgttaacattttcatgacactatagaaaactcaatgtcactgaactatgtataatgcttcattttggggaaggatgaagtcctggccctctgccgg

SEQ ID NO: 52036 - DNA, 444 bp, Mus musculus
  source 1..444: mol_type = other DNA
ggaattaggtccttggtaacctggttacaacagaatctctagaaattcccacaccagctactctggcatatacagcagagaatagtgtgtattgtttcaatatatatatctctctctttcacacacacacacacacactcaaatatgcttttttcttcattacagatgaacactaaaatgttctcattttagacaactctataatacttttgccaaaagcattattttgtcaactgaattttttctttcagtttgtgacatttgtataaacaaacaaacaaacaattttgcttaattatgggggataacaatagaaaaatacacaatatctagagaatgctactgttgggacccccacattcgccgtcgctgacagcaatctgcgcatgtgccaagggtagtttttgcctaggcgaaggataactctcctaaatagagacaggg

SEQ ID NO: 52037 - DNA, 576 bp, Mus musculus
  source 1..576: mol_type = other DNA
tcccagggacacttctgagagctcccccccggggctctgggcacgccgtgcgggggttcagcctctctcccggaaggcgccatcccgtcgccctgcaggtttgggcatcccggccccgcctggctggctggactcagccagcgcccgggggtgccatctcgagcgctcggctgcggctttgggcagttccaggactccggcagagccgggcttgcggatccagcacctccgggtaccgcagtccacaggactcctgcgagccttgcggggggtcgcctggccaaggcacagaagggaggctccggactgcttccagcctcctggggacaccagtgtgaggacgcccggggcgcacggtgagggcccagcgcggcggaggaagcccgtgcagaccgcggcgccgacactgagccgggcccggcgggccggtgtatgtctccccgcagccgcggcgctcaactccccgtgactgtgcagcgcgcgccgccgcctgccccgacccgcgctgccgccgcccggccccgcacgcacctccctctcccggggtgaccggcttgcagccgccgcccgagacac

SEQ ID NO: 52038 - DNA, 257 bp, Mus musculus
  source 1..257: mol_type = other DNA
gtcaacttgacacaagctagataccatccctggattctataagacatcacgtcagtaggaattgtaattaagacgagctggcctcatcactgaacttacagtgagcgcacacagccacacttttgaggttattgtgtatgtgtgttgttcattctgcacaacaagccacaaatagtttatttttctgattatagtacaattacatttctaacattcctaaatgttctttctgcaatcacctcttacagaagaggaga

SEQ ID NO: 52039 - DNA, 234 bp, Mus musculus
  source 1..234: mol_type = other DNA
ttgtacagtatgcatgcaacattcctacaacaaattgttagtttactgttgtatgtagcattgttatagcagcagaagagacttaacttaagacttctgaagtctgatcaaaggacctgttttcagcgtgatacatgttttcagcccgcaattgtgtgaacaggtgcctagacaagctgagcctggccaatggcagctcttgactcctccagacgtcagcgcggccgtggaaac

SEQ ID NO: 52040 - DNA, 420 bp, Mus musculus
  source 1..420: mol_type = other DNA
ttgtgtttactgttgtatgtagcattgttatagcagcagaagagacttaacttaagacttctgaagtctgatcaaaggacctgttttcagcgtgatacatgttttcagcccgcaattgtgtgaacaggtgcctagacaagctgagcctggccaatggcagctcttgactcctccagacgtcagcgcggccgtggaaacggatgtcacccagctggctcggaagcgtctccatccgcttcgggagaggggcgtgagcccggaggcgtccaggccacctccgtgtgcagccggagggagtgcgcggccccgtcagcgcgcagccccgaggtccccgcttctcccccggcggcgctcccgcccctgggtgagacccgcgcgcccccgcgggcggctccgccccctcccggagcgggcggcgcg

SEQ ID NO: 52041 - DNA, 447 bp, Mus musculus
  source 1..447: mol_type = other DNA
tgacgctgactccagatcacctactaagatctgttcaggtctacccgtctgacactgcaagagttcgctgcacagccagctcggggtgggaaggagagccggccctcgccggtcccccgcgggcgctccactcctttccggcagggccgcggggctgacccttccgggcggcctcagtctccggagcccatcccaccgctcaggccgacggctgggctcggagaagcgggatcttctacgcgagcgcagggcggtggccacggcccacgcctccctcgctgagctccgcccctcgcgggtccgagccaatgggccgcgcccgcctcctgggaggttgtagaagagggggttggggccggtggcagcgcccgccccttgctcctttctcggggtgcccggagaccggagtgtaagcctcgcaacggtggcgcctattggctggagcag

SEQ ID NO: 52042 - DNA, 532 bp, Mus musculus
  source 1..532: mol_type = other DNA
ggtactcagccacttcagcatctggggaaaggataaaatagccactttgcttattctgtcagaataagtacacttgtagtttctcatgtatgaagtttactaatgtgtgggtcccacatatgggttttcaagagtttttgacattgaaaacatacaggtaaactgaagttcacttagtatctctctaagaaaatacattttaacaaaaaatgttttcattttaagggtattacatgttcagctttaaaaaatgtaatatcatgcataacttgtaatttttcttaaatctcgactaatattcagtctatgttattaccattcattataagcttgatattatcctgtaagtattaattaaaagcctggaaattttaatgactcatttggaagccatataacttgggcttcagcaaattacttaatatcatcaaatcatagtttcctcttctattaaatgagtaagataaaattacctcatatggtagttatttagtttgtgttcttactgtgaagaaacaccatagccaaggca

SEQ ID NO: 52043 - DNA, 222 bp, Mus musculus
  source 1..222: mol_type = other DNA
actgaagttacagcagtatatgctggtgtgcctctctagtcactgcagttgtagtcagcagataaacttctgtatcacagaaaaatctacagcgttaaatggctttttacagtaaagtgtaattaaaagtgttgccataattttcacagaaattttgtcttttaaaacatgcccatctttgagatgctgctgggcagaggcactgcagtagtaattctagcc

SEQ ID NO: 52044 - DNA, 466 bp, Mus musculus
  source 1..466: mol_type = other DNA
ctgggtttaaattaagacttagctgtcagctgctaacctatagctgctgaccagtggtgggcgggtaccacgcaccaccttgtacttcaaattgcaaatacgggagaagtgtaactgcgccagtcctgcgacagtggatcgggcctcggcgccccgcccccgcccaaacgtcgcagtgctgcaggggcgggcgcagggccagagagggggcggagccaagcgcgtctccactctcctcggccaatccgcgaagggcctgggagagagggacgtaggcctacttctaggacgcagagggccgtgaagtctattggctgcgccctcagggggcggggctaaagcgctcccttcctccgcctccttcgcagcgcaaggggcgggacgcgccgccgccgccgccgccgtcaccacctctgcttccgccgccgccgccgccgccgccgctgcagccgctgcgcgttcggcg

SEQ ID NO: 52045 - DNA, 440 bp, Mus musculus
  source 1..440: mol_type = other DNA
tctgagatctttaatttctttcttcagagacttgaagttcttatttaaagagatacatgaatcagaatatattgtatgaaataatgttttttagttaaaaaaaactatgcttcaccctctccaaaaggagggggggggagacctatttgataaccttagttcatgctaacgttatagtttccactataattatttttaggaaatttatgtcataggaagatgtacgtacaatgtaactaaaaatgttttcgtcagtacttccaggtgtgaacatttgtaggcattgaatttaaactcgccccagtatgtgtcaaaacaccctgggtatttggtgtgacagtctccagattttctacagaaagaaatttgccaatagcaacttccgtgctgactgctgccaaggcgtttttgcggctgctggcagctagtcacagctgtga

SEQ ID NO: 52046 - DNA, 267 bp, Mus musculus
  source 1..267: mol_type = other DNA
tcatgcttatttagaaattgcttcaatggaaaacataatataagtcattttcaaaagcatctgctgggagcgtgcagcttcggggactcaaggagttacagatgtctctgcggtgctcagaaaatgaaggcaacccactttctttctgaaaagatttattaaatctggcaactacagtttaattcctaattggtttcaaggattagtctatatgccaatcagggattcatcagcatggcttgccatgctgtagaaacaacagagaag

SEQ ID NO: 52047 - DNA, 524 bp, Mus musculus
  source 1..524: mol_type = other DNA
aagtacatgaatatatttctgtaagcatgtgaagaaaagcctgtcagtcatgtttccctttcaatgaagcatgggtggcttttagaattaaatatttaatatttataaatgtatgtaatgtatgtagatctaattttctgaagcaaaaccttctaagtaaagtttgtctttgttatttaaatacacgaactcaaaaactgttataacaaaatcttctaagattagtaataacatttgaggataagatgacattatacataagttttaaaaaacatttagaaagggaagcattttgaattttcttcgaattcagtgtgcactcgaatcccatttggtagttactatttgagatggaggatactttcaaagcttaacagtcgttggtttattaagactgaatcatgagtctaaaagctgaaaaaatattctacataaaattatagatgattttgtggtctctttaaagtccactggatatgcacatcaattcaggggactgctgtgttcacagaataaacttctgt

SEQ ID NO: 52048 - DNA, 617 bp, Mus musculus
  source 1..617: mol_type = other DNA
ctcctaagtgatacagcgctgtaggaacagagatttcgtttctacccttgtagagaaactgtgcctggcacagatttcccctggaactcgaccagagggacacgccctgccgctctcccaaagggcggtctctcctgggatgcctggcttccaggcagcctgcaaaaagggcaagactcggcgagcgccttcccggttcccagcagccaccgcggaggcgccgcccgcacagggcatgctgggagtcttccgttcggaattccacttggaacgccgtgaggtagcgtcgtagtcggcgctccagccccgcactcgcagctccagggccccaagaacgacacccccttcccggggcgccgtgcaccgcgtctccccgcaaagagccccgctccgcccccccgaccctgctctacggagattgacagcggcgcggcgcccggagctgcggccaagtcggaggtgcgcaggcgcactagctcagcgttgacccctcccaccccccagttaggcccggagggcggggccagcacgagggctccaggccgcgggggcgcgcacgtaggcacgtagggcccgtcacgtggggcgccgaggatcgcagtgcgcgtggccgcggc

SEQ ID NO: 52049 - DNA, 278 bp, Mus musculus
  source 1..278: mol_type = other DNA
taaattgagcctttcctcaatgggattaagggctctctttgctgtagcgacagctgggtacacagagctctatggattcactgtgccaggcctgggcaagacactgtcctctttctaatacagtgcgtaggacggacagatcctggatgtggatcttcctggagactcctcagtgagaacatcatcagctttcaggtttcctgtgggcacatgaagccaacatctacactgatgcttctagctccactcacagcgtggaagagaaattgtcccttcct

SEQ ID NO: 52050 - DNA, 341 bp, Mus musculus
  source 1..341: mol_type = other DNA
agcattgtcaatacagaacacttatttatttatttattcatttaatttatttaatgtatacgagtacactgtagctgtcttcagacacagcagaagagggcatctgatcccatcacagatggccatgagccaccgagcgtcagtgctcaagcatggtagtgggtgattaactaagatgcttgaatcctatcacagcttcatgcatacttattcaagagacactgatgttcttagcacagacgggcaatcacccctcacttcttgagtgctgtggctaaaaccaaaccagtcagcggaggacagatctcccgcagacgcagacccctcaggaggactcactg

SEQ ID NO: 52051 - DNA, 454 bp, Mus musculus
  source 1..454: mol_type = other DNA
tgagaactgctcttcactgttctcatgcctgtttaaaacatatgcatacaattagtagtaccagtaaatttagattattcttaacagaggccatggcccctctgtgtgaagggttgccagccccccagttgtggctgggctcctgccctttctacatggagaaagggggcttcctctacagagtgcacctctcttttccttgagtcatcctttgctgcatacagaaaagaatgcatgcagaagggacaagttaaccctttcctcccagagtcactttatggtgggactacccagagactttgaagtgcttccttgggaccacagccaacagcatacgggtcgtgcccgacgccgaagcggaccggggcccgggcggagccgaagcccggcggccaggctagactagacgtgacgggaggagccggccggcagcacgtgccgagccagaaatagc

SEQ ID NO: 52052 - DNA, 229 bp, Mus musculus
  source 1..229: mol_type = other DNA
agaaggaagtcagtcttcactctgaacgagtcacgtgatgttacacgtaaataatcagaactgccagcgggtaggacctcacagacactagaaatctcatctctcttctattccatggagtgctgtttattacagtatgcaccagccaaagcagtttcccgcaagtcaacacacttcaggggtcctgcggattgcccagccctggccccagaggcgggagcccaggctg

SEQ ID NO: 52053 - DNA, 232 bp, Mus musculus
  source 1..232: mol_type = other DNA
cttttctctgataggagacaaaaatggttcctccttttgcagacctcaagtacttcactgcaccagaacagagaggaagcttcggtttagtgaaacagccaataaatatgctctttatttgcacctccattagcacaaataaataataaaaagaaggaagtcagtcttcactctgaacgagtcacgtgatgttacacgtaaataatcagaactgccagcgggtaggacctca

SEQ ID NO: 52054 - DNA, 371 bp, Mus musculus
  source 1..371: mol_type = other DNA
cagacactagaaatctcatctctcttctattccatggagtgctgtttattacagtatgcaccagccaaagcagtttcccgcaagtcaacacacttcaggggtcctgcggattgcccagccctggccccagaggcgggagcccaggctgcctccccagaacactgcgcaggcgcctgcagagccttagcgccagctcgggagccctacagcagcggggcgttgggttaactacaactcccggcgtgccccacgcgaggacgcggggcgtttgccctagccggccctagccgtcacggccaaggagccgaggacccgggaagccggctgcggcgggaggagggcgtgcgcgtgcgcgctgggccggctcgtcc

SEQ ID NO: 52055 - DNA, 803 bp, Mus musculus
  source 1..803: mol_type = other DNA
cccaggcacccggcgaccggactcccgaggtagcaagcacggtgctggattcctgacagtctgccattccccggagaggcggagggggcaggtatcctcggcgatcctccctgcggtcacaaggctaagaaccgcggagtgactggactcggcctggcccgcgcgcccgggccgctcagggtcagctcgggcgggcgccaggggagcgcgcgggctcggaagccggtgccggggctttaacgtgccgcgccgcacgggaaggcaggccggctgggccggcggaacttttgtcattcaaaccgtcgtccggcccggggcctgggctttgttcagtcactcgcgaggcctgggcgcgcgggcggaggcggcgcttcctccactcggaggcgggaggctcggccgcggaccgccggcgacgcacgagcaggtctgggaggggcgcgggcgacgagcggcgcgcggcggagcgggcggcggccagcggtgggcgaggccggtgacccaacagagctgcgggccgcggggaccccgcccgcccggctcgggcacacgccgcaggtcccccggcgggcagctcgtgccgcgctccgcacgctcggcgccagggcgcctctagccacgggtgggagcgcgcctcggggccgggccggccgggcgcgggaggcgggcggcgggcagcgggcggcgggcggcgcgcgggcgggcgggcgtacgggagccgccgccgcaggcccgggcctcggcccgccccgcgcgcgcccccgccggcccgcgcgcgcccaccggctctctacttgagcggc

SEQ ID NO: 52056 - DNA, 374 bp, Mus musculus
  source 1..374: mol_type = other DNA
gtttcatatatcaacccctgtgcctgacatatgaacatatgggcatattttaaagaaaacctatgcttactttacaaaatgtattaaagctagtaatttattggctgcccagtaaaccaaggagagtttaagacacttcctaggttaagaaagggtttgacacttgactggtcaagccaagacctgacctagcaggattcactgcttagagctgctgaaccgaaccgcagggcacagcggctggcagcagaggtaagccgcccaacaggtggcagcagaccagacggctgatgggcggggcccggctccgcgagaggccggagcgcacacacctgggggcgtggccgagggcgtgcccagcccgggctccaggg

SEQ ID NO: 52057 - DNA, 588 bp, Mus musculus
  source 1..588: mol_type = other DNA
tttctctagaagactgttcatactgaaagttttttatagagaacaatggaagacaatctatcctgatttttttttcaagcccaaaactcacatcagaatttacagcttattattgataggactgtcttaaaatcattaagatactaacgaagcacaacggttgcaggctaaccgctgtagacacaggaacaaatttggtgaaatttctgctcagcgcatggctagaactgagcttaccgatgcgttctttgcaagcagtgcttagagccgtgcttgtctggctgggacatccctcggcccgcgccgcacgaagcggctcagtcacgcaacccggacctgccccacagtgctgcggtgccctcccggtttccggctggttttgccgtctccggtggtggtgactgcgcgtgaggagctccccggccgacggctcgagggctgctccgacgcggccacccgccgccgcgcgctccgctcctccggggagcccagggacgggcgcgtcgggggcggggcacggcggtcacgccgcccgtcccgtgcctgcaggagtcacgtgtccgcccgggtcacgtgctcgcgccgcag

SEQ ID NO: 52058 - DNA, 480 bp, Mus musculus
  source 1..480: mol_type = other DNA
gagtctaataatttgtagaatatgattcacacttttttttgttgttttttgtttttttaaaaaaacaaactcatgacgaataacctttcagaatcttcattctgttgtcaaaattacggaaactattcacaactttattatagcaaagctgctaggagtttttatcatggaaaattctatacacaagcacaaagaatatttgttcgtcgactctaacgcaaaggcttgggagccaaggcacttgctgtccaagtccactgatcgtactcgagaaggcgagcctcgtcctcagggcggggactcagctggcccaaccgggccggccttttagggactgggctgtttcgggcccgcccaccggtcccagcagccctcgcgcgccgctgcgtcaggaacggcgtaccgttcgggacgcccaggccagggctcgtgagcgcgcgcgcgccgtgcgtcctgggcgcggggccgcgcgcgccgggc

SEQ ID NO: 52059 - DNA, 236 bp, Mus musculus
  source 1..236: mol_type = other DNA
caactctgctgaccgactaagagctcatcagctgtgggcttagtaggggagactcatctgcccccaactagtaagcaatactaagggactttacctttagaggtaaacacagacttccacttgatgtcctatatagtgcatatgtagttgtggggcggcttcctggtctaggccccgcccaccagcagcccggagagccggaagtcggagagccgagcttaggacctgggagtgcg

SEQ ID NO: 52060 - DNA, 426 bp, Mus musculus
  source 1..426: mol_type = other DNA
tctcttttttagccacagcctctgaaaatggatcatgttcagtgtccctagtgcaataaacagagagtgtgtgcttttgtaactagtgacagaaaaccaaatctcattttttaattctgcgttacactacaggaacagtttctaaaaacaatcaccatagtagtacacctttgtcatgattgtgaaacagattcaatatctatatacatgcatgatgaatgacctcatcaatgtatacatctgatatttctacatttaacattctttgagaaatctatttgaatatgcagcagagcactcatacattaaataaatacaattttttaaaaagcgcaatatttaggttagatcaaagctcaaaggcccgcggttgagcggcagcgcgcaggcgcagtggctcgggggcgtggccacgtgttttctgcg

SEQ ID NO: 52061 - DNA, 444 bp, Mus musculus
  source 1..444: mol_type = other DNA
ggggacggtgtgtctaagggccccgcggccagcgttcccctgcaggaggagctgaagtcagccgtactgaagctgcagtgtgagaaccggctgccggggtgacctcgccgcacatctggggctgcgcgctcctagcccccgggacagtgatgccgggggaggagggccgccttccccagccaaagcgagaaggccctgttggaagacctcgggcttcggaagcggaaagccgtcggaggcgcccggctggaggctcagcggcttgggattggcctcacctggagtccacacttgttggagaccatcaatgtgaggatgaaggctttcaggaaagagctgcaggccttcctggagtgtcccgggactcccccatcgggaccctgggaaaggagttgggcccagacttgcaggtaagggggctcccagccttgcctccttcagacc

SEQ ID NO: 52062 - DNA, 423 bp, Mus musculus
  source 1..423: mol_type = other DNA
ataccttgcccacggagcggaaccctcaggctccttggtgctctaaggcgtgtactgctgagactccggtagacctaggtttgaatcctgatttcgaaagctccctgcccaggccactgggggtgccaactgtggagcgctgtgtcggtcctgacgctgcatccggtaccaggaatccacccaccgcagaggggccctctcgcgtgggcactcgggctctgcgtctcccgcgtcccccgagctgcagcccccgccccgccccctccccgtcccgctagcaggaggcggggcgtgcgcgtcgggctggggacggagggggacgcgcgtgcagcagcttctctccgccggagcagccgagcagaagccgtggctgccgatcccccgcggactggcagtgggcggggagcggaactcgggagccgg

SEQ ID NO: 52063 - DNA, 368 bp, Mus musculus
  source 1..368: mol_type = other DNA
cgataatttagaataggctataacatttttaaaaatccaattgggattacttttgcaaaataatgtgatttctaaacttagctctaaatacggctgaaatttggtgagtaatgtgatcattcttcgcaagcatgccaaggaatttgctaaataaatccctgttctactttcaataaaccttcggagtttagtcactcactgaattttacgaactgtaagtctgagcggggccccagtgcacgcccctgccagggtacgtcccacggagcggagcgcacggctcggtcctccgaccgacagggggcgggctccagtcccgcgtggcgccgcgcctgcgcttcctgcccctcccggtccgggatgctgct

SEQ ID NO: 52064 - DNA, 383 bp, Mus musculus
  source 1..383: mol_type = other DNA
tctagatagaggcctgggatataaaccacacggaacatctgtcaaaagcactttacagtggacgggtgagtataccttgcccacggagcggaaccctcaggctccttggtgctctaaggcgtgtactgctgagactccggtagacctaggtttgaatcctgatttcgaaagctccctgcccaggccactgggggtgccaactgtggagcgctgtgtcggtcctgacgctgcatccggtaccaggaatccacccaccgcagaggggccctctcgcgtgggcactcgggctctgcgtctcccgcgtcccccgagctgcagcccccgccccgccccctccccgtcccgctagcaggaggcggggcgtgcgcgtcgggctggggacg

SEQ ID NO: 52065 - DNA, 259 bp, Mus musculus
  source 1..259: mol_type = other DNA
cacatgtgcattattggtgatgcagaattagtcactatattcatataatccagataatactggcaacactgactcactataaaagagtgagttctgactcactataaaaggggctactattttatattataccatcctatggctgtgggccacagagtcacttataaagcacaacatcccttgtaccttgttcctcaaaagaaccagcaggttctccctgtgacacgtggctcacagccaggtcatgatcaggtggctc

SEQ ID NO: 52066 - DNA, 681 bp, Mus musculus
  source 1..681: mol_type = other DNA
tctttggtctttaaagcaccactaagaagagctcttgttgagcactaacctacttgcaaacacaaattggattagttttggtaaataacctaaaataaaataaaataaaatgaaataaaatcttgaatttgagttttaatttaatcattaatagcgtttgtgttcacttaataaaatagtcgtctcatccatttgcactgcagaaatccatggttcgcactggcggcgacaccacgcagtggagcggcagaagcgcatcctgcttctcaggcgcggggctcgggcacagaggccagatcaagcggccctgggcgctggcggctctggcttcttcctggtcggcgctcgcaagccagccgccaccgccaccgcccgggacactaccgccccgtgcctggcgcgctccgtgacccgggacaaacttctggctggggcgcggtccctgtccccgaggccagcgtgggaaacccgaggcgctgcggaggcgagctagggtcgagggtggcgccccgggaggttgctcctgcccgccgggtcccgcccgcatcttgctggtggccgccccacagagcccgcaggcgccgcgcaggccgagctggcccggggccggggacacgggcgctcgcgccctctagcgggccgcggcggctccggcccggccgtgacgtgggctccttccag

SEQ ID NO: 52067 - DNA, 243 bp, Mus musculus
  source 1..243: mol_type = other DNA
gtcatttcacagaggccagagctcctgaagttacacctgggaggcacagcaagatcctctgcctggggcgggggggcagtgggcgctatagcgcccaggcaagctgcaatggccactctcgctgggatcagttccctcagccagggatcactgtcaactgtgataccaaagaagagcggagatatgaaaccgccctgtgacctgtgagcacataccaggtcagttgacacttagagacaaggg

SEQ ID NO: 52068 - DNA, 331 bp, Mus musculus
  source 1..331: mol_type = other DNA
agggccaaacggtacaggtttgttttgtacttcctgttaacaaataatagccaactattctcattagaattttcaaagtgatttagacaactaaactaaaactttctcaggtttaaaacgagtttttccaaaatgagcgttgagaccctaggcaaaaaagctacccattttctgaacaggcttaacagaaacctccccaactggagtggagggtcagagtacctgggaagagacccctaggaaggactccgcacggcggggctccccctggaggacagacctgggcgcagcggggcgcctttgggcggccaggcggcctgcgcaccaggcc

SEQ ID NO: 52069 - DNA, 264 bp, Mus musculus
  source 1..264: mol_type = other DNA
atcaggagaaagactatattgcacttttgggtatggagtacttttcagacagtctggaaacagtatctgtcagggaaatcgaattcgctgtcacttagactagcaaacgtcagtgccattcagctcttcaatttccgattcagatgagagtgttacatttaaatgagagtgtcacatttttcttgactgccaggcaggaaatgagctgctggctggagccgcaagctccaggcaggtttccagtttcctagaagcagggatccg

SEQ ID NO: 52070 - DNA, 447 bp, Mus musculus
  source 1..447: mol_type = other DNA
caaatctttttcttaactaattagagtacaagggaccagttacatgtacattgatacaagttcttgtgatcatctaattaaaaactgaatataaatgtaaataaataaaataattaataaaaacacattagcaaatggtttcatattttttttttaaaattctcagtgtatggtagtcaagaacaaactcaaaggaaggttgatcttgtgaaagtaatgtccttgctcaaagcaaaagcctagtacttaatttgtagctattgtctgcatatttggacttacatacctccaagaaagaaaatttcagtttaaatcagtgactttggcaaaagcagaagctcagcagctccgggtttctcagcccacactgctaggaccgggctggtagacgtgggtggtgaagtcaaaagccagcagcagcgcatccacgaatgccacgcggtgggg

SEQ ID NO: 52071 - DNA, 323 bp, Mus musculus
  source 1..323: mol_type = other DNA
atgacatagagagagactccagggagcccttgaggtcccttatgagcccgctccgctccgctccggcccgtcctggcttggttcgttggggggcatccacgctgcaaactcttgtcttcagggacagcatcactcagatcctgatggggaactccctgggaggggctgtcagctgaggctgaaggcgtttcagctgcgtttcgcgccccgacctggttcaagcacgcggtgcaggtgtcgcctcccctggtgcccctcttgggaagggggacaaggggcggggcggggggcgggtgcccccctgagagccaagccgggccggg

SEQ ID NO: 52072 - DNA, 412 bp, Mus musculus
  source 1..412: mol_type = other DNA
aggcctgctcagaaggccttagaagccttgtgtgagatggccagagaactaatcaagtcaggatctctctctctttaagctttgtagctcccaggaaagagggagctgctagttatcattctaattaactccggtcttcactgtgaacttaaatctggagtcctgaacctctgttaacacacttccaatttcaaaacgggagacactccccacggggatctctagcagctgactctcgcgtcccccagagctaggttctagaggactgctcaacctgcagcggccccctcccccgcgcgggagggaagccaggacgaggttggcccccctcgctcggagtctgggcgtgggccccgccgcagctccgcggagcctccgtgcctcctgcaaaggggggcgggggagccctggg

SEQ ID NO: 52073 - DNA, 414 bp, Mus musculus
  source 1..414: mol_type = other DNA
atcggcgatttccatggcagtgaaagttgactccaagtatagcgaagagaattttcttaagtagagtactctggttgttctgagtgtgagctttatgatggagtataaactcccgggaatcagggccctttgaagggctccaacagggcccggacagtgacatcattgctgggctagcctgcagaagcctttcatgaggctttcaccgtgaaaaatcttcgaatatttctgtcccataagaaaataggcttttaaatttattaatttgcactattgtactattgcaatatcatgcgtaaatttttttcatttttaggttattagtgccatctttaaaatatctcttgtaatttgacattttaatccttggagaattctagtgtggagacatgtctggtccaaattagcatctaa

SEQ ID NO: 52074 - DNA, 623 bp, Mus musculus
  source 1..623: mol_type = other DNA
tggcacttcatttgctggccgagctcagcgcccgaaccgtgcgcgcccaggggcagacatggcccacgcacatgcacacgcacacgcacgggagcgcaggctccccgcgttcccgacgcagtgccgaggccgggcgccggcgggagccctggagtcgggagctccaggagggggcgggtgctcgagaaaggagctcgtgcattcgctcccctggccgcgcccacccccttctcccgcgcgcgggctccgcgcgccccttgccgcgcgcgtgcgcgcgcgtgcgcaggccagggctctccgcgggcggccccgtagacccattcctcgctcgctcacgagggaggccccagccagttccgtgcctgcgcaagcggcggcgcgccttctctcccccccactaccccggagcccgcaccgcgcatgcacggggaggggggtggtggctcgtgcaggaggagggctgccaccaccagggacgtgcgtccctggcttgcgcgctgccgagcgagggagcccacagcgacagcgagcgtctgtagcggtgccaagctgcaggtaagcgcgggccgggtggccggggacgggcgcggggacgcgggggcagccggcggcgggcgcggccg

SEQ ID NO: 52075 - DNA, 343 bp, Mus musculus
  source 1..343: mol_type = other DNA
gattgcctttggttttggacaaccctgaaacccacacgcgcgtgttgcaagctggtggcatctaatgagcgagatctggaagctcttaagccagtggtcacggggaacaggacccgcgagcagcgcccttgtcatgcatgcattgcttgctgacattgagaggcctgtggttcctccctctgttcagagaccacactccctgccgggaaaccgggcaattacctttcttcggtggaagcggtagaagcgccctgctccttcggcggtgaatcgccaagctggcgcggggaccgaggaggagctgagccgggttgcctctcctcctcccgccggcggagcggtg

SEQ ID NO: 52076 - DNA, 393 bp, Mus musculus
  source 1..393: mol_type = other DNA
accaatggagttgataatcaatgaaaaggctatcatattgcgaaattgatagctatctgaaatgtgttactagctgcctgaaagatatatactcttctgggttgaaatgatttcactttgaagcttgcaagaaatttggacattttataaagtggtactgtgtgtaggacacaggagaaatgaaattagttctactaaatcactattttgtcttggtgatgaaataactaaggtaccatctgccaaggcagtagcaggagcatgcaggtgagactcctcccatctgagcaatctggttaacagtgaagataaaccagaaagtgaagtaaatttctctaatgccagtttagaactcaagaagaaagcaggttgcctctggcttgtgtgttaaga

SEQ ID NO: 52077 - DNA, 491 bp, Mus musculus
  source 1..491: mol_type = other DNA
tagtgttcaatattcacaaacgtgaatattaccagagaacagaaggaacagaattcatttttcttttctttcattaaaatagtgaatgaatgaaaaatacattggttaatctaatccatataagacagggtctgcggatggacccaggtctgctttctctacttagaattgcagagtaaggagtttacttcccccactagcgggtggcggcccctggctccgggctgagatgctggcgtccgctcccgggaaggcgcggacatacttgcggacggaggctgagcgggcgcgagcgcaccctccgggagccgccagcgcctccccgcggcccgggacgcccgtgccttggccaggaccaaggccagcggccacttcgtagcagccggagcgggtgggagcgcctggcttctggccgtggccgccgcccgcccgccggctcccgtggttgggcggaggaagcgcgggactcctcctccccgccgtattaacat

SEQ ID NO: 52078 - DNA, 513 bp, Mus musculus
  source 1..513: mol_type = other DNA
ttagcctgaattccccatttgattccaaactagatgagtaaccagtgaattactgaagaatattaattaatacatagtcaccaaatggaatttaagtattaaaatgcatcttctgtctttggacacagactgaagttctgtgactgacaatgactggcttgcaatcactgctgttttagttaattaaaaaaaaaggatattgttatttttaaatgtcaagaatcagatgtctgccgttgggaactgttgtacagctgccagtgactgatttgaagacattaaaactgtttaattctcagctgagattttctataaatgttctatgcagagtgagtggcatattaagccattcggaagagaaaggttttagatttccaactgtttgcctaagaagaagaagaaaaaaaaatcccttcgaatcttgtatttagcattcatccttcatccagcggcagaaacaggaaaggggaagggaaacctctccctctccgtggaagtagagagacacacaga

SEQ ID NO: 52079 - DNA, 283 bp, Mus musculus
  source 1..283: mol_type = other DNA
cagatttgaccttatttattgacaagaacaagtttatgtagaaagttcctacaaacctcatgctttaagtaaggtggtccacccagcccgggatacagatgagcacactcactttgctcactcctgtgaacctggtccattgacaacgcattaattgagtaaagcttaacttcactcctccacgaataacgcaatattatttcagttatcaccccatatgtgctgtcctcagttaaacgaatgaaactggaaagtttcaagtggagagttgcgagcagatcgc

SEQ ID NO: 52080 - DNA, 288 bp, Mus musculus
  source 1..288: mol_type = other DNA
caccgaggggctgttgtggggaggctgagccgcgccacgctcaagaaccacgctcggcccaggcgccgcgtttttttttaaagagatgtgtttttcactatcaaaggaactttaaaatttttactagtttctgaaagttagcaggcttggttgtaagtgcaaaaagcgaggctgtcattgtttccaccaaagctttacaactaaaacttgccgtcagtctggtttaaaaacaaaggaggtccctcgagtgttccagtcgtggcgctggtgcgcatgcccgggagcttc

SEQ ID NO: 52081 - DNA, 288 bp, Mus musculus; identical to SEQ ID NO: 52080
  source 1..288: mol_type = other DNA

SEQ ID NO: 52082 - DNA, 505 bp, Mus musculus
  source 1..505: mol_type = other DNA
aataaaccaataggaatgagtgtttatttaatgcacacaaagtagacactgtttactgaaaagtcccccatctttttaaaaaggcgcgtgggggtgggggagtcgcagtggggcacacgcgcgctctggccgtccccctgttagatttcgaaactgccttgcaatccaatagagctttagcccgggggaatagacatttgcccacggtgactatgtctgcctccccccacccccactgtcgctgttggcagaaacgaggaggagggtgcgctgtgccgcgcccgcgtgtcaatggcagctgcgcctgaagaagttgataccccttgaatcagaagctgctgcctccggcggctggagcagagatctctggggtggacagaggagatgtccttaaaccaggcaggcatgaccctgcttctgggttccgccagcgcgtagagggacgggtgatctcggcccccaggcccagggttgtggagcttgggggcggaggcaggacctcctg

SEQ ID NO: 52083 - DNA, 339 bp, Mus musculus
  source 1..339: mol_type = other DNA
acaagatggccgggaccagcccttgtgaagacaatggttagctctcaccttgagcagccagagctcctcagagctgagatggcagcctgcatattttataaatatctgcactagctggcctttgggtgaggcccaccaggcccggcacctgacaggctggagccaataataataactaactacactaaagtaagtttaccttttaaacagttgtttttccgccgcgcagacagcggatagaaaatgttgtaaagcccgggtgcaccagtcctgcaggaacgcaaggctgctaccgagcttggctccagccttaagtgatctcagaattccgccagcgcg

SEQ ID NO: 52084 - DNA, 364 bp, Mus musculus
  source 1..364: mol_type = other DNA
ggtcattttaaggttcctgcctggaaaaaccaccctcctcggaggggcaccggcggtgacgtcgctgaagtgacatgtgacttttttaaacaaccgggcataggtgaaaactagacccagaagtgcgggcgtgcgcgtctcaataaaccaataggaatgagtgtttatttaatgcacacaaagtagacactgtttactgaaaagtcccccatctttttaaaaaggcgcgtgggggtgggggagtcgcagtggggcacacgcgcgctctggccgtccccctgttagatttcgaaactgccttgcaatccaatagagctttagcccgggggaatagacatttgcccacggtgactatgtctgcctc

SEQ ID NO: 52085 - DNA, 187 bp, Mus musculus
  source 1..187: mol_type = other DNA
tggactgctctgagcaggcctcctaaaagaaatggatatggaaagggaatctcttcatctcggtttctctgtgtagccctggctatcctggaactcactctgtagaccaggctggccttgaactcagagaatggaaattcatggtattttgaatgaccaaccaaaatagttatttcaagaatgtggg

SEQ ID NO: 52086 - DNA, 306 bp, Mus musculus
  source 1..306: mol_type = other DNA
agtataatcatactcagtttgagggcctgggcttgatccccacacactcaaaaactttttttttttttaaaaaagaggcagaaagacccttgggtcagtctcaaatcctttgacttaaaaggaactcaggctgaggcaggaggttcctgagttaggaggctgaggtacacagctgacttcagaccaaaacacatgtattcaccaatgtgaaggaaagtcataaaaattgtgtttagctctttaaaagagagatgtaacataaaaccaattatatgtcattaagcatatgaggttagttttgtggtg

SEQ ID NO: 52087 - DNA, 535 bp, Mus musculus
  source 1..535: mol_type = other DNA
gcttttgagttaacttcaaaccatatcactgattaatgggaggaatgtttcttgaagaaaacatccagtttaaataagaactattgttagcagctgctccacgcaaggagacccggcgggtaacatcattcaccctcgagcgacataggtggagcaagtattgaattcatgaactcgagacagcgcggcggcggccctgaaacttcagtgtttcctcccgcgtgggaagcgtgaaggctgacctagacagtgagtcaccctagcttcctgcgcaggcgcgctccagctgcggggcgaggggaggccccgggctctggggggcggggccagggccagtcacgtgacgtccgcggcccggctcctcaattagacgggggtccccgcctctcgccgcgctctggaatgcgggcagagggagagctccgcgtcccggactcccgaggcgccccctcccgtccgggctggcgcaccgaggcgaaggagcatggccgctaggcttccttccggttcgcgagcggaggccggaagtggccgt

SEQ ID NO: 52088 - DNA, 537 bp, Mus musculus
  source 1..537: mol_type = other DNA
tcaaggaacaaattacaggaattggttgttctctgtgggccctgagaaaataacatcttgctggtacacggatactcagtgagacctgtagaccaggctggccttcagctcacagagatgcaccgtctgacacggaatttctgatcagacttctagaatatgacctcccggcggggagaaacccactggagagtgctcagccgcctgtttatctaaaactcagtttaaccaggccaactgatcaggcaacttcgggctgcccgctgcaggcgccaggggacccccaaaccagggcggctcccagcccacccgggtcaaattccagcgctggcgctccgccctcggctcgggaatgcggaaggggcgcggggggagaccagcaagccggcgcggctgcggcaggaggatgccggctacaggcagccaggtggctgcctggacgcttgcagcaaccccctgccacggttggtcgcgccgggctcgccggtgctccttccgccccgcccccgggccggaagtgcggcgccgccactgtcc

SEQ ID NO: 52089 - DNA, 554 bp, Mus musculus
  source 1..554: mol_type = other DNA
ttgttctccttctggacagggagctgaggaaggcctaagctttctgctgcactgcctcagaatccacggtctctgactgctcagacctctgagtttgtacgtcatgttgggccccttaaagtccctgaagatgaagaacatttgtatttgtacaagtatcaaagggagaaaaattttgtttctgacagcttttgagttaacttcaaaccatatcactgattaatgggaggaatgtttcttgaagaaaacatccagtttaaataagaactattgttagcagctgctccacgcaaggagacccggcgggtaacatcattcaccctcgagcgacataggtggagcaagtattgaattcatgaactcgagacagcgcggcggcggccctgaaacttcagtgtttcctcccgcgtgggaagcgtgaaggctgacctagacagtgagtcaccctagcttcctgcgcaggcgcgctccagctgcggggcgaggggaggccccgggctctggggggcggggccagggccagtcacgtgacgtccgcggcccggctcctcaat

SEQ ID NO: 52090 - DNA, 253 bp, Mus musculus
  source 1..253: mol_type = other DNA
agcagttctggaattacagatgtgcaccactgctgcaacaccattggttggaagcaaagaaggataagataacgaattccttttcctaatttttcttttcctttttctaatgaatgaggaattggacaattgcacctgatgctaagattcacttttcgctgtgctccatgtgtcacaaacagcgcacacaaagccgcgtcttggtttttagctctgaacacaagccctgtatgtttaaatacaaagaaggctg

SEQ ID NO: 52091 - DNA, 596 bp, Mus musculus
  source 1..596: mol_type = other DNA
ccgcgcagctgcgacgacacagagctccggagtcagctctctggggctctctggtttcgcggggaggcaaggatccaaggcgcgcggcgccggcgagctaagtgtgggaagcagagcggggtctgcgccccggccgcccccagctcgctccgcccaggtacgctccccgagccgcggctcccgccggtccccgccgccccgcggggacaccttcccgggccggaccgagccgcccccgccccgcgccgcggccagcaccactcaccctgctcagccgcgagaaccgagagtgagcgtctccgcgaagctccgccgctgccgccctccgcagtacggccacttccggcctccgctcgcgaaccggaaggaagcctagcggccatgctccttcgcctcggtgcgccagcccggacgggagggggcgcctcgggagtccgggacgcggagctctccctctgcccgcattccagagcgcggcgagaggcggggacccccgtctaattgaggagccgggccgcggacgtcacgtgactggccctggccccgccccccagagcccggggcctcccctcgccccgcagctggagcgcgcctgc

SEQ ID NO: 52092 - DNA, 400 bp, Mus musculus
  source 1..400: mol_type = other DNA
acagcgtgttctacagtctgcaagctacattgggctcccaatgggaatgaaattgcacttccccacagcggaggagtagtatttctcgagcatttacgggaaactttcaaccttgaaaacatttctttcactggtgggaaacgaaaggtttcccgggtcccagcacatgtgtcacactgttcatgctcgcggtggatgccatggccttccatcgaataacactcgcagctgcagccgttaaagtgcactttttaaggcagcgccgcaaggttgccatggggaccggaggaaacttagcgcccttctgaggccggcgccggcgtcgagctgctctctccccggaggggcccagggctccaggcgcgcggccggcgggggcggagctcgcgtcacgtggccg

SEQ ID NO: 52093 - DNA, 425 bp, Mus musculus
  source 1..425: mol_type = other DNA
ctctaggttcagtgagagaccctgtctcaaaaatatagcagacttgacttagtctgtcctgtgtacctgtgccatactttaacatacaagatgtaaaaagaatcccaaaaattcaattagtatatttaattcagaatatagaatattattttactacacatataagtactagcttcaaattcaataggcttatatggctggaggctatttgtaataaattccagagtcttagaaaatgacttcaataaaatgttttaacttaaaaatgaagtatatatgtgtgccttaacactgtgaacagtataatgaagaaaaaatatctagtagttagactatgaaaagttgaagatgtgattggcttaaggaatcattaactcaatacacatggtgcggcctgccccatgcccctgcttatcatccgtgga

SEQ ID NO: 52094 - DNA, 332 bp, Mus musculus
  source 1..332: mol_type = other DNA
acaaaaaaaaactattataataaatggtcttttaaaaatgtttgcccgcacatacatactgtgtgcgtgtgtgcaggccagagagctagggtctgtcagtgagcctgcagcctcagaggaaacatccgccttgcagctgcggggaggggagaaatcgacgctgagtcccccttgagtaggttccccccgccggggggggggggcaataactagagaggccccgggggatcgaggtggggaccgcccgaagcttgctgcacttccggaggggcccgaaccccctgccgagaggcgatgggccgagacctgtgcgtcattgagggaccgcggag

SEQ ID NO: 52095 - DNA, 283 bp, Mus musculus
  source 1..283: mol_type = other DNA
actgtggttacagtcatctctgtatagactgttgagtggagtctgtcttgccttaggcactgactgtctctggccaaggccactctgcgcagttaatagtttggactcattactcctagagtccaataaaaattgacttctgcattagcctaaagctggacatccaggtaacgttcacccgctggaggggatgatcttgatttggaagttaaaccccttttgtgctctgaacattgtgggacacaaacgttatgtcccattgtatctgcaccctggggtgtgg

SEQ ID NO: 52096 - DNA, 365 bp, Mus musculus
  source 1..365: mol_type = other DNA
actaggtaaaccaggatggtctcatttttatgttctaatgccattagtttcaagaagtaaatgctaatatatgggaactagtaacgcctgcttgttgttccgaggaagcctgatgttaaatatccctcagccttccttccaggacgcagcgcttccaggagggctcgggccgctccgcccggacagccctactcgtcctccagcttcccggacagggcgggactcccttcgggtcaccgacgctaacgacgacctgggaagagcccagagctcgcttggcccccgatgcggacacttccggcgacgagggcgggcgctgagcgagcgcgcatgcgtactcgccgtcgcagtcctgacgtcagcgc

SEQ ID NO: 52097 - DNA, 662 bp, Mus musculus
  source 1..662: mol_type = other DNA
ttatttatttattattggatattttctttatatacatttcaaatgcgtactggagcatataaagttttatgctcaagttttcttagaagctgactcaacctcggtgagtaggttaggtattatcccaagaccccgcctggctaacccgggggcgcgcatcgcggcctcgtgacgtcagagacccgctcttcctcagcggtgcccggtgttttagctagtgtccaccgcaccgggacccaggtggtgcaagcttccagccgccgcgtccgcccgacttggtagcgccctccgcatggctagggggaaggcgccagggccctgcagcgggagcctgcatagaccctggggcgacacgcttgcgagttgcgcccccccccaggcccctaaggcgctggaagccagcttccaggccgtccccagtccccgcggtccgcaggagcccgggggcgtggcctgggcgcgaagccccgccccaccttggccagccccgccccgccccacggcctgctggactagccgggtctctcctcctgcgcagcagccacggcggcggcccgctcttgggcggcggcgtacgtagctggcgggctctgaggcgcgctcagcgcgtccctgtgttcgcgggtcgcggaagtgacgtacggcaccccggcagaagcgcg

SEQ ID NO: 52098 - DNA, 194 bp, Mus musculus
  source 1..194: mol_type = other DNA
catattaataaacacaggctgctcccgcttttaaaacaagtatcaaaatagtcttctttagcaagctgggctgagcgctgagcactgagccacacccgctcagcttctcaacgagacccggcgcccagctttccgtaattgaattttaaagtttccgcccgcgctgacgtcaggactgcgacggcgagtacgca

SEQ ID NO: 52099 - DNA, 313 bp, Mus musculus
  source 1..313: mol_type = other DNA
agccctggccaggctggcttcgaattcagaaattcccatcggatagtctcgtgccaccaagcacctgtgaggctgaccagagaagcagtgcgtcctatgacgcctgggtgacggtcctgtccaccaccactagtgacttaaacctggttaagactgtccaggttccaactctgtgcttttgccactcgcggaaagccaggattttagcccggaggccaacgagcccgctcgggccaccgtgctggacgccaaggcggtgacgcactctgtcggcgacgcgggggagcccacagcctgcactaccccaaaggca

SEQ ID NO: 52100 - DNA, 423 bp, Mus musculus
  source 1..423: mol_type = other DNA
tatgtatgtttagaatattttttacattattatggaaacataccttttcagtgtacttgggctggtaacacttttgtctaagccattaacattaccatgaccttggttttttttaaggaagttctgtctgttaatctctggatgtatggaccaatactagtctacttgagtttgataacaagtcagaactgtatggtgctctcatactatatatataaagcagttgccctttgctcactaaaggccactttattcctcttacacacttgtgcacaagggaagaagccagccctggtccttcagggcagcccaccggggctcctcccggtcagcgaggggcggggcggggcgatagcgcaggccccgccctcggcggttcccgtttggctcccgcggccgcgcgctcccggccctccgcttggc

SEQ ID NO: 52101 - DNA, 401 bp, Mus musculus
  source 1..401: mol_type = other DNA
ggcttctggatggtccccatggaccacagagagctggatgcatttattcagcagctaggcttcctgggagtgaggcagcctgttccagactcctctgccgagcggactcctcgctgaaaatgtttggctttcggctacaaaaatatctctgtggagataaacagagggcctattctgttctgaggtcagacccggctctgcggccttttgcctacggaggcaagctgatgagcagagaggcctctggggcctagaggccgtgtgcataggatcaccttcctatggcccactacccagtggatcccagctggctctgggagacaggttggcctctggggcgtgcccagcaccgggggaagccacggccgaggggaaaagtcttagtgctctctctctctctc

SEQ ID NO: 52102 - DNA, 259 bp, Mus musculus
  source 1..259: mol_type = other DNA
agtagaaagatggtaactccaaattttgcatttccttgttattaaattgcaacaacaagactctagcaggaagagccagtagtctggctggttctaacagactaatagtggtatcttggtggatactttaaaaaaaaaagcaattcaccagcagctcctgttacaacagatccttatgggtttccgtgtttcagtggcacttagagccaacaaaaggcaaattgctttctcttttagccgcagctgccaaacaactatt

SEQ ID NO: 52103 - DNA, 294 bp, Mus musculus
  source 1..294: mol_type = other DNA
tgatgtttacatgcctttagtccagaattatgttcttggaaacaaataactcttcaccgtgcttgccgggatagacgtttactaaaaagccttttcccagaaggccatggcaataagacagagtttcactctgtagctcacctgagtgccagaatgtcaggcatgcatcaccatgcccggcatttatgaaagcagaccagagccccttagctggtttgcccttacagcaggcatataagcttaaagcacggcttgccatccgcatctgtcaggacacccctgagactgggcccc

SEQ ID NO: 52104 - DNA, 409 bp, Mus musculus
  source 1..409: mol_type = other DNA
atttgaaatttaaataaacaaagaaccaataaaataaggaaaaaatttcttctatctatctatcatttatcttttggagacacacatccagatgtagccctggctgtcctggaactactctgtagaccaggctggcctgtatctctgtgtgttaacacagataaaagaggcatcttgtttcttcaagccccaactctaactttgatagaactatgattggataattattgtacgtacatgcagctgttacaatctcggagatgtaagtaaatatttcttttaaacatttcgtctagttgtttcataggacgtagttttaaaagccaccgtccacagggtgggcccggctaaacgctggcctgcgtcatgcaggccccaccccgcgccggtgcgcctgcgcccgggcgaa

SEQ ID NO: 52105 - DNA, 426 bp, Mus musculus
  source 1..426: mol_type = other DNA
agacttaagtttttgagaattacttcctgagttcgaggccagcctggtctacagagtgagttccaggctgtccagaaaccctgtttcgaaaaaccttgtttacaatgatttgtttaaggcaattcgttgactagaaaacagcctcttgttttcgcttggctatcaggaagctatggcctcagccgccagcaggtgacgccgatgacgggcaatgagtcccagctgccgcaatttgaggcgtctcctttgggagtggggggcgggtcctcactctcactacattggccgcctcggccgaggaggcagacttagcctccttgattggcgggcgagcggcgaggagtccgcccatccgctgcggcttcggggtggggtgggagggcggggccacgcccggtgattgacgccgaggcccgaccgaggaga

SEQ ID NO: 52106 - DNA, 350 bp, Mus musculus
  source 1..350: mol_type = other DNA
gccaacagttcgaactggtggtctctcaacaagttagttaccacacgatagggaagaaacagtttgtgaggcctccttaactcaagtttacaaacttgtcagtcacatttagcctttctgcagcatccctaggccatacatggcctccctatgcatgggtgagatgtgttcttccagcccaggatgctagtgctgcagccccatcaccatcctggccagccaaggttccttttatggacagatccccatttgtgcatggcaccgcaggggctctgcacagcaggtgcagccgccgccagaccttcctcctgttgggggcacagggggcgcaagcaggaggcgagcgagcg

SEQ ID NO: 52107 - DNA, 654 bp, Mus musculus
  source 1..654: mol_type = other DNA
cgccgcgcagcggagcgctccgcgagcccacaacagccgcgaccttagcgacccgcggcccccgcccgcccgccgccctcggcgcctgtcgcctgggccgccggtccgcagacagctctctcgccccgcccccacagccgccgtccccgccgcagcgtcgggggcgcgcccgggctccgattcggggccggcccgcgggcccgcgctccagggccgcgctcgcaccccgcccgccccgccgctccggaggctcgactcgtgctcgggtgtctgggctgtgggccgtgcccgcctcgtcggtgctagcccctatcacgctgccctctggaccctgggcgtggggaacactgcccggtagcctgcgggtgccgagcgcccggtcgcccgcgcctgcccagctggttgtgccgaggaggccccgccgccgccgccgcgcgctccgccttgcgccgggcgattggctggaggcgcgatcagctgggccggctgcgggcggtcggcttggcgcagaccccggtgctgctcggggagcggaccgggaggctctgctgcggtgggcacgctcctgcacggaaaggtgtgcgactcatttatggaaaatctgaaagtaatttcaggcttgccttgctttggttcaggtcaaccgaccttatc

SEQ ID NO: 52108 - DNA, 289 bp, Mus musculus
  source 1..289: mol_type = other DNA
tgcactcttgaaaattctaataataaacaaacaatattcatttcattgattggtaaattaaggcttaagggaacactgtaagtcaagccatgaacagaactgcagtatcagggttttgcaaccaggaggcatgatattctgaaatttatttgtaaaaagaaaatgtgttcttaggagatgagatgtgacttgctcagagtgaccactcctgccagggaagctgtttccctggttttgtaaaattacaggaacaaagtaaggtggggctgcagtgccagctgcacctata

SEQ ID NO: 52109 - DNA, 370 bp, Mus musculus
  source 1..370: mol_type = other DNA
acagcggggcagcgctgggtactgagtcagactccgctgcacagcagttgtctccaagatagacaccggaactgcaattgtgtgtgtgtgtgtgtgtgtgtgtgcacacgcaagcgcgctcgcgcaacccctccggcatgggtgcctccagccccgcagctgccgacagcgggcgctctggcgccctccccgtatggtcaggaagctgcgttgacattgaactccagctcgggaacacgcgtgtgtgtcaacggctgctgggagccagctcaggcagggtgcagagcccggctggtccccgccgccgcccgcgggagctatgatgggcgaggagaggcggggccgctcgccgacaagccccgcccctccc

SEQ ID NO: 52110 - DNA, 326 bp, Mus musculus
  source 1..326: mol_type = other DNA
tggagccagatccaacactgtaggtggggcaagaaaataacgactttaggggttgaatgaaggtgcgttacaccatcaggaacctggctctagaggcaagaaagtaatgattgcctccgatttatttaagaaacgacgaaacgttctgcgcctggccacactgatctggggcgcggttcctttaaggagcttagacgacgcccggggtctctccccactgcggagcaggggcggagcgcccggttcaagggcttcccacgcagccggagacgccttgcgtcactgcgccaggagccaatcagggtggagcccggagggacgcatta

SEQ ID NO: 52111 - DNA, 226 bp, Mus musculus
  source 1..226: mol_type = other DNA
gggatcatctcaggagtgctctccgcccacctgggcctccatggtgctccgctaggggtgcttgggctccagggagaagtctcctctcaggctgacagagtcaacactggcatgcctgcttatttgagtcctttctataagcctatcaatgaacataatgattgactacatttcagattgagctgaacccagatcaagcatctggaagtgagagcaatcagtcaca

SEQ ID NO: 52112 - DNA, 488 bp, Mus musculus
  source 1..488: mol_type = other DNA
ggttgggtaggctaggctagaaaccacacctccctattctagagctgtatggaaactggagtcagaactgttcctgtctctaaatccaagtgactttagtctggggagctactctccggtggttgtgctaacattagaccctttttttctggcaagccccagaaaaagggcttatttttacaaggagaaaaaaaaaatcctcagggatttacttttgccttaatttttaaaaggacatctttcgagttaaatttagaccagctcagttttccattaagagaaagttgccaggcacgaactcgaccttggccctgaaatggtcaagtctgaacttgagacatcacctggcgcgggctagtcttgcttgattggaccgcagggtgctccacggtcggcgggaggcggtagcgcccccgctcagagcccggttcgctcccgccccgcgagtcagtctgctgtgccgggggtgccgggcacagcctcggatt

SEQ ID NO: 52113 - DNA, 443 bp, Mus musculus
  source 1..443: mol_type = other DNA
gtttttaagaaggctttttatgtgacctcaaatgcctcatccttgaagagacatctcaccttcttgaccacgaaaaaagcaaaagatggttctgcttgcttgcttgcttggtttctctgtgtagccctggctatcctggaactcgctttgtagaccaggctggcctcaaacaaagaggaaagccgtttttgtttgtttttttcacttcacctcaggcctggtgaaaagataagttactgataatgggtcccaatattagtatccccagggaactgacctcagtaaccggaacgctttcccacaggactctggcagcagctttttgcagatagagtccgcgcggccgcagagcgcctgcccatagacatggcggcgccctccttggcttcgcgtcgcccgggtgccagttctcggggacttcctgcacgtctggcatttaaacg

SEQ ID NO: 52114 - DNA, 201 bp, Mus musculus
  source 1..201: mol_type = other DNA
cattctatggaccagctcaagcgcttagagaacgccgaaactttaggcagagtttgctaaaagctggctggcacctgcctgagaggtggagggcaggtggaaagtcctgccagggagatccatggtgggcactgcctggcctgagggaagcccccagccagggcgggcgacacggggtggcgtctggcgctccataaaggg

SEQ ID NO: 52115 - DNA, 237 bp, Mus musculus
  source 1..237: mol_type = other DNA
gcataggcatttacaccagatctgataatttgacaagttttgtgaaattctggaacatggatgtcccttttccaggaagaaacagctgagtcctgcaggcgacataagggtctgtgtctctgaccttcacattctgccaggccctgagagagtgagctgcaggccagtggaatcagcctcagtggctgctccttccctgctcttcctggtatggcaagtgggaggaggaacctacaa

SEQ ID NO: 52116 - DNA, 763 bp, Mus musculus
  source 1..763: mol_type = other DNA
agcgcgatgtctctgccagcgaaacttcgcggcgtggccccagacttgcattcctgggcgataccccgagggtgggaaccccaccaaggacgccggggaagggggaaccccgacgggctgggggggggggggggggaaggggctcaccccgcctcgcggctgcgtcctgcgccccgcgccctgcccccagcctctgctggcgctaaaccccggagagcggagcgtgcacgctgagcctcctcggcgggcccggccgcggcgctgggcatgctcagtgggccggccccggtagagcggcgagtaaggacgcgtgggctccccaggctctgcctttcccgggttcaggccccggccccgggctgtgtgggggggaggtggcaccgatcgccgccgccctccggctcgcggcctcccgacccgggatggcgcggggccggtcccgcttccgccgttgagcgcgcggcacggcgggcggaggcgcggggcggggcggggccggcgggcgcgcggcgggagggaggcccagcgggaggctcggcaggccgcgcgcggcgtggccggggggcggctcgcggaagcagctcgggcaggggtaggggcggcggcggcggcggcgactccgcggccgcgcggctagggtaaagccgccgtgggccccatcttccggcggccggcggagtttgtggtgaggccgggctggtcccctccccgcggccgcctcctcctgggctgggcccgcggcgtctcgtcccctcgcggagcc

SEQ ID NO: 52117 - DNA, 408 bp, Mus musculus
  source 1..408: mol_type = other DNA
agggagctaactaggttcaagaactaactagtggaaagcaggctctcctggaactcccgttcaggaagctctaatgatttcagacacctggctttaaaatgtaaaaacgaaagccatttcttctgtagaaattgaaccaagatccttggttatcccaggaaaaaaaaaattatatatgtgtgtatgtatacgtatatatgcgtgttttgcctgaatgtgcgcggagcacacgcgtgcctcgtgcctgccgctcagcaagtgagtggcctcggttcctcggggaccgtcacttccaggtgccacgaaggagccggcaggtggccaggcaccccgcgcaccgcagaggcgtaggcccacttaggcgggctcgggcacttctgcccgcggggccgctctgcgcaggcgcgg

SEQ ID NO: 52118 - DNA, 415 bp, Mus musculus
  source 1..415: mol_type = other DNA
aaatctatagggttacagcctaagggctctaccacctggtggtggtgtcagagtcattcattcattcattcattcattcattcactcactcactcactcactcactcactcactcatagaatagtacgcaggcgatgctgcaccctgaccggtgacgtgcaccagtaaaacaaccttatacttaaggttgacgttcaacattatttttaatgaaacagttgggaatttgataaatgtatttttaacataggctgagtctacctcgatgttcctgcttcttcatttttaaaacaggagtataaactgtaataaaactctggtagaagactttgaacagacctcaaagcctgggcgagcagccccgcccagagcagctctaatccgcccaccggattctgaaggcccgccccttccg

SEQ ID NO: 52119 - DNA, 327 bp, Mus musculus
  source 1..327: mol_type = other DNA
actcttgtataaaataaataaattaatcttaaagaaataataaaaacgtaggtgaatttgcaaactttgggctgccttcttcataaattaatttggccagagtacttaaaccgtaggtggaaatttacagctttacaatgaccagttgataaggagactaagctttgtcacgacacataatttcgtaaacatcctatataattaatatatagaattattgtggcaggttgtttttttttttttcctttgaaaaaaaaagggcctcacttttttgccaatgacttccggtgttggagtggtttccggaatcaacacagaatcccggcg

SEQ ID NO: 52120 - DNA, 363 bp, Mus musculus
  source 1..363: mol_type = other DNA
ggcaaaaactaccagaagatggcctcagatctgacaccaatgtatttgaaattatgaaaagcttcctgaaacgatctatactgggagtaccagggtcttggagaaataaacagttgttaactctttttttttttttttaaatgcaacataccttttaaagatttatttattcattttttttttaatgtatatgagtacactgttgctgtcttcagacacaccagaagagggcatcagatctggaagagcagtcagtgctcttaaaggcttaactctttaccaggaagcaaagagtgcctaagttcaaagtccctacttcctgacgtaattatgtaaataccccgattattatggttcttaagc

SEQ ID NO: 52121 - DNA, 353 bp, Mus musculus
  source 1..353: mol_type = other DNA
aaattgttctatagtgtcatctttatatcatagaaataaatgaaattgccgccattttgaagtaggtcccagcactctcagactgaatcagtgcagtgaggcctagcattcatgggccctctggactgaatctcaggtcacggtgacccacatggccaagtggaggccacgggagcctcctgagttctgtctgtcagtcactgtccagtcactgctctgttagtcctgaaaagttaagtggaaatgctttcaggcctataatcccagcacacaaaaccttgaggttgtaaaaacctagttatgaaacacatcactgaagtgtataactgtcaatggggaagcccaggcgtctc

SEQ ID NO: 52122 - DNA, 314 bp, Mus musculus
  source 1..314: mol_type = other DNA
ctaccgataacacaaacgtgtaattgtaatccaaagatcaggagttgaaggcctccttcctcagctacaagaggagttggatttaaaaatttatttcttcaaaagtcgaacatgcgcacaagggcggcgtacgcgcgcgcaccagagccattcaccgaggacgtgcgcgtgcccggccgccgcagcgaggtgccagcggcccaggccaccggccgcggcggtgctcctgggcaagcgaggggcggggccggcgagcggcgcgtgcaggtgccaggctcccgggctccggctggcgcgcgagcggctccgtgggc

SEQ ID NO: 52123 - DNA, 320 bp, Mus musculus
  source 1..320: mol_type = other DNA
ctttgcagcacctcattaatgagcatgtctgtttattaaaagattttctcagtcttctaagatcaagtgaaggtgctgggaaccgctggccgccctggccacgaaggggcctctgggcggctccctgccacgcgcagggcggaactcccctggagcagcagcgcgtggcacgcgcctagtcctaccacgcatgctccgcttgaattctgaggcccgcctaccgggccctgggagctcttctgtaggccaggtcccccgccagcctgcgagctcgcttggcctggccggcctggcgggcgacgttccctgtgcgtgcaggc

SEQ ID NO: 52124 - DNA, 198 bp, Mus musculus
  source 1..198: mol_type = other DNA
gtgggaggcaggtttatgtgatgacagtatcaaaaccagttaaagaaattattcttttttttcggtaaccgcttggaactaagggcgaagctcaggctggccttcatccaaattatagcctatctggggctcaagggctccattagaagtaacttctacagcctgcgctccgtctgttggggatcccggttactgcga

SEQ ID NO: 52125 - DNA, 436 bp, Mus musculus
  source 1..436: mol_type = other DNA
aaacctcctggaactgagtgcacttaaccactgaattattgctccagtcccgggcctttaaaaaattgttttaaaaaatatacagttattatcatggacttttgattgcatgtaaaaacagcattcattctgttgacattgtcttaattcagatgttagcagtaaagacgtcgttttcttcaaactctgttttgcacgagagagagagagagagagttccggaggttgcagtcctaaagaaaaccttccttcaactcgagtttccggctgctagaaggaaagggccgttccctcaccttgccgctggggagcgggaatccctgtccacccgacccatagccccaatatctggatgcggagggtggcgggtctgctgcagattggctgttcagatctgacacaggctccaccggggagaagaaacttttaaaagact

SEQ ID NO: 52126 - DNA, 345 bp, Mus musculus
  source 1..345: mol_type = other DNA
ctagcccctagggttgctagcaagtgcttgtaacctgctgagtcagctttccagcctcaacatatttttaaatgaaaggagagaatgagtctgacatggtgctcactttgtaatcctagtatttttcaggaaatggatgtacacagaaaatgctattatttctgaattcaaaagtagagactgagggaccagttaagtcacaactcaatggctcacactaaagttgaattatttaggttaaattttcttcagtgtgtttaccagtgcagacttggaaggaacacacacacacactcatacatgcatatgtgtgcacatgcacacgtgcgcacacacacatgcaca

SEQ ID NO: 52127 - DNA, 185 bp, Mus musculus
  source 1..185: mol_type = other DNA
gactggctagaaaatatcagtttcatttctttcatgttttagagcaccatgcacttttggctcaagaaagttctttgtgaatccgtggcctgtgcacaagacatgccgcatgcctgaaccatttcaagtgcagcaagtgagtttcagagagcacgcaagagcaggcttccctctgcctgaaacct

SEQ ID NO: 52128 - DNA, 198 bp, Mus musculus
  source 1..198: mol_type = other DNA
gatgaatcccacaccatgggcgtggcagcctgccgccgttgtgaatctcctctggctctttttgacaacggctgcagccttgaagggcaatgctagaaggctaaagtttgcccaagcagattggttgtgcttttctagacacccagtggctgagccaacccacggctcgtttgccaaagcttcagtttctgacctccc

SEQ ID NO: 52129 - DNA, 463 bp, Mus musculus
  source 1..463: mol_type = other DNA
tcatagataaatatgattttctaactacatcatctctttgaaaacgatttcctccttattcaacagttctttaagtgagttcacagccagcctggtctgcatagtgagttccaggccatccatggctctataaaaccaaaagttgatccattgtctaaactgcatgtaatcaaatataccctattgtattcgatatggagtttccctggagaaactttctgaagcatccatactgaggaaagccacttctctaaccgtggactcctacactgaagaaaaatcaaatggcattttcctggctaccccgccctgggctgtggctctgtgcacatgcgcatgcgccccctggctgagtctctgagtctcccagcctcggtgccacgcccttcttagggcagctagcttcacttgggcggaaccaaactgcttgcgcacgctcggggcatgcgcaacgccagctgtc

SEQ ID NO: 52130 - DNA, 461 bp, Mus musculus
  source 1..461: mol_type = other DNA
cttctttattaatacattcgtgataaatcttttaggaaagaatgtcaagacttgtaatctagtgttgagccttactccagagaggattaggtggatcattcataatatcttttacaaagtctattccgagtggaagatggattctcgtccagtttgcggaaattccacgatccggccagtgcccagcctaggctgcagcaacagctcgagccgtcccgcccccggtgctccaaagctagccctcgtggcccggtgccggcgggggctcgcgtcgctacgactgtctcagatccccggccgcagcgcgctcgcggggccgggccccgagcccggatgatcggcagcagggccgactcggtgccgggctgcgggccggccggcccgagggtgggggggcagccaatgagcagcgcgcggcgcggggagagggcgcagccggagcggcggaggctccagccata

SEQ ID NO: 52131 - DNA, 666 bp, Mus musculus
  source 1..666: mol_type = other DNA
tagacactatatatgtatatatatatatatatacatatatattcccttttaaaatgtacttttctcctctgttttataacattttataatatattattgaaagatgtttcacccacctgaatgacacatttgaaggaataatgattctgtctatgttgtagttaaatgcatgtgataaaactataatcctagttcagggtacagtgtatatggcatacaacaatcactgctctttaccttcatggataattttattttgcaaataaacaaacaaataagaagctaggtctatgaaaagaaagctttccatacctcagccatgcttttacaagatttaattttcattaaattttaaaggtcgcattttctaagtactttgagcatattcactcacataattattagcaagcatgcgttttggaatggtaccaagcaaacatttcccagtaaatcttgtcaatctagatggagtgttagaacagtaagtaggtttaaagaagtcttccttttagccacttttagacagggacactgagggaagcatcggaagtgactcaactcggttaaggtcttccagaagactaagagctggaggacaaggggcgtggcctcaagtgggcgggcaccgttggggcgtggcctggaagcgacagggcgtggctgtct

SEQ ID NO: 52132 - DNA, 295 bp, Mus musculus
  source 1..295: mol_type = other DNA
cgccagctgcctgagtgcacgttccccagcaggagggggcccagctggaggaaaggatgcagatagtcagtgcagcctagaggactgtcagatgcatgtcactaatgtctaagtaactaaaagagtcagctctgttcattagtgctgaaaaaaatgaaagaaaaaaaaaacccaattgccccttcttggatattttataaagcaaagttttaaagaaataaaagtcctgtctaacaacttcacttttgcgtctcagatgggttagaaaagaatatttagaaatcctttcccaaaa

SEQ ID NO: 52133 - DNA, 457 bp, Mus musculus
  source 1..457: mol_type = other DNA
gagcaaaaagggactttgttccttgatgacaagaactgtgacatctatctttatattcctggcacggaatattactgacaataactcttttaatactaatatttcagaccaagtgttaaactggagagttcctcctcctaagggaaaactggtctgttaacaagcactgagcccctctgcccagggagcgccgctcgcgaacttccgcatgaagggagcctgcggcggcgcgacccgaggggcatcggctggccgcactgccgaagagacccgcggagggcttcggtccggcctccgagaggcgcaggcctacaggcaagcggggttcgccacgccccgggactacatttcccggcaagccccgcgggccgcagttgacccacttcccggcccgtcacgggctcgcccggcccccgcgcccgggcggctgctccctgctgactggggtgtgggcggg

SEQ ID NO: 52134 - DNA, 288 bp, Mus musculus
  source 1..288: mol_type = other DNA
tttataactatttataatgaatgggcctgtaggcatacatgcaggcagaaaaaatgtgaaggttcccctcctatgaggaccccctcacttaagagtcacaacagcgaagtgtttgtgtacagaacacacagagctgggctaactctcctggcagtcacaccggagctttactgcccggaaccagctccgcggaggtcgcgctgcgcatgcgccgtgcaattggcgcaggggggcgggccggtccgcaggacctgtgtctcgcgcgtcgtctcccggcttcctgagggc

SEQ ID NO: 52135 - DNA, 564 bp, Mus musculus
  source 1..564: mol_type = other DNA
ggaaagaaagcgtggtttcatttctcattagagaactaactttgaaaggacaatgataccccgaagcaccgagctcaggcgtctggggagctttcaccgggacccaggagtgaccgtagggtcggcggaggcgggccccacggggacactgcggcaggggcgcccgggacaacccctcgccccgggaatgcagtgctccgggtctggatgcaccgggccgctccgaagcaaaccggggtccccgggccgccctgggatgtcagcctcccgtcgtaggagtcctcgagctgtcaaccccgaggctgaggatccccggcctcccctcggaaaatgtcctgggacccagggatgtcacagcctgcaggctctgacagcgcgcgagaccgcctcacctcctggtctagtccgagccgagcagccaagctccgctctgccgagggacccggatgccccgcctcccaaactccggccctcaggaagccgggagacgacgcgcgagacacaggtcctgcggaccggcccgcccccctgcgccaattgcacggcgcatgcgcagcgcgacct

SEQ ID NO: 52136 - DNA, 550 bp, Mus musculus
  source 1..550: mol_type = other DNA
gtgtcactgggcagtgtgccaaagttccattatgggagtgtgttacagtcttacaggagggcatcggatcccattacagatggttgtgagccagagcagtcagtgcttttacctgctgagccatctctccagctcaggcaaggttccttattaagcagctggccgcaacaaggggctagcaggtaactgctgagggctggacaaatagatttaagagagaattcttcaaccctctggccaatgttgtcaagatggctatgtcctccttggcatggcagtgtgaaagaccctctgagaggcgagttactcagtatctccctgcacaccagtttcaaagtttgttttgaaaagtaatccaggagcaggaggcttgggtttctccttcttcttcctgcagagctttcccagaatggaagccaggaagtgtccgaaacctggagaagctggcagttactgcagcacaggagaggggaggcgggcccggaccttggctcccgcgctggggtacagaggcgacacgcctacctgacttctcgcgggtgcgagccgg

SEQ ID NO: 52137 - DNA, 412 bp, Mus musculus
  source 1..412: mol_type = other DNA
gtatgcgtgtaggattccacagaaagtaagctgctcccaagctcggtactgggtgatttaccagtttagtagatacttcctaaagatgctttaaaaaaaaaaaaacgtttattttctcctcccttgcaatgctttgcatagaactgtaatctgatgaaagaaaagctaggagctcttctcttccctttcacagaaaatcttaagtccaggagcagcctcctcagtgactctgcagagggctggtgttgccccctgctgggttcagctgcttcttacaaggcctcaaatatatttagtcaagaaatttgtcataggtttgaaacaggatgccaggatgcatctgatttcctccactacccctgggaccttgcccacaatccctgggttgtgggttgtctcccacaatccctgg

SEQ ID NO: 52138 - DNA, 189 bp, Mus musculus
  source 1..189: mol_type = other DNA
taatgatggtttttaaacactttaaccttccttgtaacccaccatgttgcacagttaaagccaagccaagctaagctaagccaagccactctgcagccgacagactgcattttaataaaagtggatatagtctgacattgcctcttgactattgggcagcacctaggcacagcgcttctcacctttagt

SEQ ID NO: 52139 - DNA, 399 bp, Mus musculus
  source 1..399: mol_type = other DNA
tcagcttgagaatcttttcatatcttgaagaaggttcttcaaaagccttttccctaataattcatatgtgatggtttttaaaaatgaagttcttactgaatttcccattgacgaccttcaacatttattcagaatctgaatttggccaaatactcaaagtctttgattgacaacccgatgtgtttgaatttctagagagacaaacaatgttactcaggcctgcaagtggtacgacatggagtacagcggtgagtattccttggagctgcagcctccagagaggctcttccacctggatgaaggccatcgtgtcatcagggacactagctgacaggatggcggccatgatccttctaatccaggatgatgctgtccacactctgcagtttgtagaaaccc

SEQ ID NO: 52140 - DNA, 274 bp, Mus musculus
  source 1..274: mol_type = other DNA
gaaagactcaaagctttctttctgcaagttcaaggtcaacctcatttcctttaactcaggaaaattaaattacattctgtcacctaacaacacctgatggctctagaggccttcgggctcctctgtgtacacacactgggtgataagatgccgcagcatcggtccgatggaggcaaggcatgcaccagcctctctgtggaccagctccatggaaacaggaccgggccacgcctacaccccgaggccaggctccgccccggaggcggggtttaaa

SEQ ID NO: 52141 - DNA, 389 bp, Mus musculus
  source 1..389: mol_type = other DNA
gggaaaaggcttttgaagaaccttcttcaagatatgaaaagattctcaagctgaaggtccgatcctcggaagacaacactccttccaataatagaaagtactttatgaggtagtgtcataaaaggctaatgtaaactggcaggttcttttagtgtagattacacatacggtcgtgttcaaaacatttgcccacgtggttagaatccgatcgcctcattttagaaaaactgttttttttcccactagcaggtcggaggctgggctgcgggtcccaccttcccggcagccgtgtccgaggcgtaacacctcctccagggagaatgcttggcaaggaacgccacaggttcctggtcggccgacatggcgggctggacacgcgagtgcagccc

SEQ ID NO: 52142 - DNA, 412 bp, Mus musculus
  source 1..412: mol_type = other DNA
taggacacacatcttcataatttgttccacatatgaatgtcctaagtattataaatgtagattcgttagaattgtacatttcggactgcaactgcagtgaatggacctaaaattctagatgctacagcgagaagtatatttttaattttaattgttttagaatcagataactatggtatagagctatgctatagcaaatatttaagataatcagttttatagagaaaaataatattttggctcaatgttagttgagcaggaaaacgatgttgtcttatagcaattagaaatctgaaatttgtaagacacatgtgttttaaggtaatgattatttatttgcaaatttacttttctgtttttgagctttaaaattaaccaggatatttgagtacaaggttcaccttttaaatat

SEQ ID NO: 52143 - DNA, 424 bp, Mus musculus
  source 1..424: mol_type = other DNA
aaagatgtaatcagatttagattttagtggataaaagattatacacagttttgttttaaaagcactccctgggggcagggagaggtctcatttcaaatccaggactatccattaatattacagattacaatatattttactttgaagatataaaacgtcgacgtggaagaactataagacagctgcccccgggaggagggtcctccactctggacgctgcgttcaggtggtcacctcttgtcaccgactgccagcgcccgcctagggtccttccagtcgcgctcaagcccgcgctccgagcgcccggtggggacctctgcgggtttgcagagcctccgcgcgccccctcggagccagacccaccaaccgcgcgcggcggggaactacagctcccggcaggccccgcgcgggccgcgcgcccccg

SEQ ID NO: 52144 - DNA, 423 bp, Mus musculus
  source 1..423: mol_type = other DNA
aagaaataattacttttgggacaactgtaatattttaaatctcacatatttcagtaattatttcaaccttacctgtcagtttgctgtctcttaaaggaaagataactattttcgagaaaagtctaatagaatatcagatagacattacaattcatagcagtagtaaaaactgcaattatgattgtatggttgataggtctcagaccacctagaacctgggacggtgccttgtacagagcattgcacaaatattgaggactacaggaaggcttttccttctttctaaaataaggaagcttggattccaaagctcctgtcacccagggaagctcagtcccctggcttccaggcttctgggagttgcgctgcacagcggggcagggcgaccggcgcgcgttcccgggctcgtgaccgctggcggcc

SEQ ID NO: 52145 - DNA, 455 bp, Mus musculus
  source 1..455: mol_type = other DNA
tgtatcccttatatagaaatgccataaatttacatataaaatgaacatcttcccatagactttaaatcattcctaatttgcttataatgtttgatgacatgcaataagtattacattctttaaagaataaggactccctaaaattttacttgggcttttccttttagagacagtcataagaaataattacttttgggacaactgtaatattttaaatctcacatatttcagtaattatttcaaccttacctgtcagtttgctgtctcttaaaggaaagataactattttcgagaaaagtctaatagaatatcagatagacattacaattcatagcagtagtaaaaactgcaattatgattgtatggttgataggtctcagaccacctagaacctgggacggtgccttgtacagagcattgcacaaatattgaggactacaggaaggcttttcctt

SEQ ID NO: 52146 - DNA, 772 bp, Mus musculus
  source 1..772: mol_type = other DNA
cgcttccgcagctttaggtcaatctctgacagacctggagggggaggagacgtcaccctcccgacaggctgcgtcccgcaggctctcagctcccccgcgtctcccgcgcgtcagatccgcgctccaggttttggcgacagcttgcaaggggagccggctgcacgttgacagcaagctacagctgccagggggtccccagggagctgcggccgcgctgcggcgacccggtcaggtggcccttcttccccgcgcaggtccccttcctccgctgcgaagccccgcactgctagagcacgagggtcccgggtgcgggcggagtcccattgttctcccgcaccgtacggacagcaacgctctggggtcccctctttaaagggagcaccccgcctgagggagccccagccggcattgcctctgagagaagccaccgaggtgacagtgggtagcctttgtcctccaagagtccgcagcctcgcctccagtcctgcgggtctgggggtggtcggagggacggtccaggtcggcccgcacccttctccccgccctgcctcacagccccgccccgccccgcgccggccccgccctgcgtcctgcgccccgccctcggcaggttgaggcccggcgtccggcagccgcgcgcacagtgtcgcgggcgcttccaactgccgctgggagcacagcagcgggacttccgcagcggctgcctcccgggagacgccgcgcgcagtcccggagcagattctgcggtgaaccgttgccgcccctctggttc

SEQ ID NO: 52147 - DNA, 783 bp, Mus musculus
  source 1..783: mol_type = other DNA
attaacattaattctctgggttcctacagaggtccagggacagaggggcgggtcgtcctgaggccctggctgggtgaccgcaggtgtcgcccttacggtccggagcagcagcagctgcgccacttgcgccgcctcgcagagcgtcccggagagccgccacccgcttccgcagctttaggtcaatctctgacagacctggagggggaggagacgtcaccctcccgacaggctgcgtcccgcaggctctcagctcccccgcgtctcccgcgcgtcagatccgcgctccaggttttggcgacagcttgcaaggggagccggctgcacgttgacagcaagctacagctgccagggggtccccagggagctgcggccgcgctgcggcgacccggtcaggtggcccttcttccccgcgcaggtccccttcctccgctgcgaagccccgcactgctagagcacgagggtcccgggtgcgggcggagtcccattgttctcccgcaccgtacggacagcaacgctctggggtcccctctttaaagggagcaccccgcctgagggagccccagccggcattgcctctgagagaagccaccgaggtgacagtgggtagcctttgtcctccaagagtccgcagcctcgcctccagtcctgcgggtctgggggtggtcggagggacggtccaggtcggcccgcacccttctccccgccctgcctcacagccccgccccgccccgcgccggccccgccctgcgtcctgcgccccgccctcggcaggttgaggcccgg

SEQ ID NO: 52148 - DNA, 436 bp, Mus musculus
  source 1..436: mol_type = other DNA
ggtggatttaccaagactgggccatgtctccagctccagcatgctgtgcttttagtaagcagaagctaggttgtaataaacttgatttcacactaggaagtaaaaattctataatgtgaaattgttttcttcaatttccttcagtaaagaatagtatattgtacaatcaatcaaccctgattctaaacaggggtgcatccatttttaattctattcagttcattgatgggaactttagtaattaagatccaggccagccttgggctatatagagaaaccctattgctaagtgagagctttacagaggggcatttaagcagttttttaaaagtttgacagaattatcattacacaatctgcagagcgtgatgctgtgcaaaccttcaacaccactggttttgaggccttggaagccatcggtggcagggatggccca

SEQ ID NO: 52149 - DNA, 531 bp, Mus musculus
  source 1..531: mol_type = other DNA
agaagctaggttgtaataaacttgatttcacactaggaagtaaaaattctataatgtgaaattgttttcttcaatttccttcagtaaagaatagtatattgtacaatcaatcaaccctgattctaaacaggggtgcatccatttttaattctattcagttcattgatgggaactttagtaattaagatccaggccagccttgggctatatagagaaaccctattgctaagtgagagctttacagaggggcatttaagcagttttttaaaagtttgacagaattatcattacacaatctgcagagcgtgatgctgtgcaaaccttcaacaccactggttttgaggccttggaagccatcggtggcagggatggcccagggcagttgcctccgaggcggcctgcggggcgctctgcggggctcagctttccgggtcgagagaagcaggcccggagcccggggctgagcagtgctggcggccggaggaggcgggagccccgggccgctagcggctcctcccccggcgcctccgt

SEQ ID NO: 52150 - DNA, 302 bp, Mus musculus
  source 1..302: mol_type = other DNA
gagggtaaaggcctttgccacacaagcctgaaacccctgggacccaaggtgtgccatgacttcatggtattcaataacaaataaaactatgttaattaaaatgtggttaatagtgattgagatgacacagagcgaaggcacctgcctaccaattgcaagtgcattaggaagtagagagagagatccagagtctgtctcacctccagctttgcaaaaacaggtgctgctttttaagtttaagagtcaaactgcaattttagctcttaatttgtcagctgactccctgaacctagagcaacgtc

SEQ ID NO: 52151 - DNA, 474 bp, Mus musculus
  source 1..474: mol_type = other DNA
ggcaccccgcccttggccgccgcctcggcgtgtcaggtgtcgtgcgcgggaggggcggccgcgagcagcgcccagggagatgaaaccgtttgttggcggtgcccaagcttggatcactgcctggggcgacctgagctgtcacgaagccttgccttagaactttaaaggtttccaaatctcagaggtagagatctgtgcacacaaagggccgcggccgtgccaaaccaagctgtcctgatattaaaatagcaagtttcttttcctggctcggtgcctaaggatcatgagcaaggcaccacacctggaggaggagggcgtgctcctggttgagctttgctccagcggtcccaagctcggttccctaacaaagctgccagcaggagggtcccactggaccaccctgggtcactaagcacggatgtgagacccaactcacagatctgtggattttcgcacccagtccttaaaaccccg

SEQ ID NO: 52152 - DNA, 365 bp, Mus musculus
  source 1..365: mol_type = other DNA
gccatacttcccttgaaatgaaaagtaggcagcggccctgcctgagtaaattactgattttaaatggctatacaatagtcgattttatgggcatatgacatttaagtcatgaaagactaacactttaactaacttgtccatggtttcctggccagtacaagtagaataaaggggatctactttctaactttagtttaatggaaattatttcatagaactgcatctctgtgactgtgcccagatagcttactgtcagaactctaggtgcacactaccctctcatcagctccttataaggccttagtgggaagcacatgatagaggctgctttttactttaaaaaaattaacctttttttttttgtt

SEQ ID NO: 52153 - DNA, 398 bp, Mus musculus
  source 1..398: mol_type = other DNA
agagttagtgcagaaggaactcacaatctgtgtctccaaagatagagaacaaaagtttgatgacactaacggttttcccactttttcaagagaaaaggattttctcctgcagccatggttgtggtacaaattctgacgtatctgttataaagtttctcgaactttctagagaggatgtattagaattccttctctgatcagatgccttctccgccctgcggcaagggggcggccgcagtgggggttccccaactcttccttagaagtctgagagctgcggagctccgcggcaggttggcccgggcggaggaggacgtgtctgggccgcgcaagtcagagggcggcgctaggacccgcaggccgccccgccggctcccgggaggttgataaagcggcgg

SEQ ID NO: 52154 - DNA, 538 bp, Mus musculus
  source 1..538: mol_type = other DNA
tgttttgttttaaaacaacacctttagttattcaaaggccttttgcaaatagaaacagctaaaaaccttaaaacagtctttaggctagagtttcctattttggaaaatgaagacgatcattaggtcacctatgccctgcgcagaccttttaaagattctccaggtctccctcatctttttaaaatgaagaagaaaagcagcggcggccagggcctaacagcgctaaccgccacggggctgcaaccgctgcggaaccgcgcgcagcgggcgttgcacggtcccgaccggagcccagcgagagtccaggctgggattctgacgagccaattggaagccagatcgactttcgctcttccaatagggcaagggggcggaaactctcgggccctggatcccatcccgcccggcggcagtcaaggcggggtggaggctccgcctgagcggcggaccggaagccacggcccggccccatccttactttcgcgtcccccccggggctgggagccgcgaagctggcggagggaagagataaagggaa

SEQ ID NO: 52155 - DNA, 483 bp, Mus musculus
  source 1..483: mol_type = other DNA
aacacagtacctgcccttaagcacgtccagttttgttttgttttaaaacaacacctttagttattcaaaggccttttgcaaatagaaacagctaaaaaccttaaaacagtctttaggctagagtttcctattttggaaaatgaagacgatcattaggtcacctatgccctgcgcagaccttttaaagattctccaggtctccctcatctttttaaaatgaagaagaaaagcagcggcggccagggcctaacagcgctaaccgccacggggctgcaaccgctgcggaaccgcgcgcagcgggcgttgcacggtcccgaccggagcccagcgagagtccaggctgggattctgacgagccaattggaagccagatcgactttcgctcttccaatagggcaagggggcggaaactctcgggccctggatcccatcccgcccggcggcagtcaaggcggggtggaggctccgcctgagcggcggacc

SEQ ID NO: 52156 - DNA, 288 bp, Mus musculus
  source 1..288: mol_type = other DNA
atattgtactttaataaagcctgctgcaagctctttttcttaggctttgtagcatgaatgcttaagattccttcatatttcacagtcagaaacgagtgagacagttgtttgaacatgagctcagttctaagaccagaaatacagatccagaatccatctagataagcaatgaaagactgaggtattttaatctcatgatcttactgaggatcctaataacacttctcccctaaagatgccttacgcgcgcgcacctgcgcaaaatgcaattgcaattttcttaaagac

SEQ ID NO: 52157 - DNA, 320 bp, Mus musculus
  source 1..320: mol_type = other DNA
tcacagtcagaaacgagtgagacagttgtttgaacatgagctcagttctaagaccagaaatacagatccagaatccatctagataagcaatgaaagactgaggtattttaatctcatgatcttactgaggatcctaataacacttctcccctaaagatgccttacgcgcgcgcacctgcgcaaaatgcaattgcaattttcttaaagacgcaaactcaactggaaagtttgcttctcagttacctaaaaattttaaaaatcggagcattttccccgactgtttagcaataaaggggaggagttagtctgagttcctcccc

SEQ ID NO: 52158 - DNA, 334 bp, Mus musculus
  source 1..334: mol_type = other DNA
catataataaataaataaatcttaaaaaaaaaagaacttagctctctttttagagttgaattttggcaaatgcagaattcaaaggcagctgtaaggttttaagtaaaaattcacacacaacttttaagggaaaaataaatttgtgcttcagatgcaagaattgtccggctcagtatgcttgcaaacttttacagttttgccacaactttaacactccccgggggaagttactctgttgagccttttatgggcaagatcccggcgttcccatggaaacgtatccctccgctccgctcgaagcttctttgtgccgcgcagaacgttgaataagcgc

SEQ ID NO: 52159 - DNA, 198 bp, Mus musculus
  source 1..198: mol_type = other DNA
tatttgatatggaatttcaagtagtaattttaaaaaaccgattcatatttaatgtttaccaggctggcctgcagaatatcacagtctcgaagattctgcagtatgtcaggagaaaccctgaacagtttacccagagagctttgtgttgaattcaaaaagctttgaggtacgaacattttcaagatttctaagcatgct

SEQ ID NO: 52160 - DNA, 690 bp, Mus musculus
  source 1..690: mol_type = other DNA
atatattatataatatattaaatatgtatatatattaaacacacgtttaatttttgaaaactgtacttgtgttttcaaccatgttgagttgtcattgtaaaatcagcatattagtctagaaacatcatattcactgtattacataggtaaaaccttatcttgagttcgattacagaaactaatattctctaaatcccacagactcgggggcccacgctgtatctccggatcccccgacgccgggctgtcggtgcccctccaccccagagtggatgctgcggctggctccgggtccatcagctcccgagaggaagcgcgacaggctttcgcgactctgcgattcccctaggctcgccagctcggcaggctggagggagctgggctctaggacagagcgggcctcggttgctggggcgaccgggcgacctctcacccggaagaacccagcccggaccccgaccctgggtgccgcctcctgagctccgcagccagcaacgctacgagccaggtacggcctgacgtggcatgtgcggggccgcgcgggttcggggttgccaggcccgcctgccgcctcccctcagcccctatggtcctgcctgtcagcccaggggcagtgaacctggacctgcagaatcctggggaaccccgggatctgcagtcgaggtcgtccacacccacggctaaaaggag

SEQ ID NO: 52161 - DNA, 466 bp, Mus musculus
  source 1..466: mol_type = other DNA
aaaaggttacattttcaacttgagctgtaattttcacgcaaaaatctgaaccaagatttaccgattatagcggcatccgatatcacatgcgttttctgtagaatacaaattaggttactggatccaagtttggctctaaaaggatcctttgtttcacacccaagttcaggaaatggggctggcgcccctccttttagccgtgggtgtggacgacctcgactgcagatcccggggttccccaggattctgcaggtccaggttcactgcccctgggctgacaggcaggaccataggggctgaggggaggcggcaggcgggcctggcaaccccgaacccgcgcggccccgcacatgccacgtcaggccgtacctggctcgtagcgttgctggctgcggagctcaggaggcggcacccagggtcggggtccgggctgggttcttccgggtgagaggtcgcccggtcgccc

SEQ ID NO: 52162 - DNA, 642 bp, Mus musculus
  source 1..642: mol_type = other DNA
gccagcctagtctagccagggcttgaattattatactgtacccataaatatgtacaattaaaaaatgaaataagatttgaatggaaaaattaccaaagtagtaggtatcatctatagttttaaaattgcattaaagatatgatttttttcttgctaaaactctattccaaaactgaccaaaatgaaaaaataaagtgttgaattgagtaccgtgtgtcatatttcatttaaaatattataaatgtgtttcttaatgtcattgtcataatgacattttttattaataggttaaaatatcttttgaagtattaaaaatggtgttttattttttgtaatagctttgttgttaatttcaaaagactatagtggtcaaagaacctccaaataataataataatgataataataataactagacattttgggttcatttaaattcaatagtattgttattgtactgccattcattaggagctaactgcatgataatgatactccatagaaatcaaaataggtttaactttctaaatatgtaactttgtctaacttctgtgtgcctcctctcacccttggaagcagactcagctccactcacttgattagctgacctggagcttatgtaattagaagagacaccagtct

SEQ ID NO: 52163 - DNA, 368 bp, Mus musculus
  source 1..368: mol_type = other DNA
taaaccccgtgtacttacacactgtgtattatgttgattacagagttatatgaacagacttataaagatattctagagcaaattatatttgtcacagtactatggtattttatttaagatacgtgagaattcatcatcttagagtagatttaatatcagaatcctaaaacgattagaggagattatatacaagtcattgctatctctaagactttcctaggatattatttggactttatttgaaaggatcgataacggaccgtccgccttctgcttcagcctccagagggttgagattgcaggcgtgtgaccccgatcttttcagcttttaaaggaaccaaaacttttacttagtagtgctggaatta

SEQ ID NO: 52164 - DNA, 522 bp, Mus musculus
  source 1..522: mol_type = other DNA
gtttgctggaaattaaatgtgtctgtaaccgtcaatctaacccactctcttaacattcactgaagctaaaggcgtgtttgaatcaaggcagcctttcctaagaaagcaagggaaaatgaagctggcacaccggtgctcgctccggtcttgtgcaccgggcaggcctgcagcccgtagcgtggtagccaccctgcccactcgccttcgaaggccaccagggccacagcctgtaaccacgcgtgtgctggctccgcctctgcccgccccctccccgccgagggaaccggggctggccctgagatctaggcccggggcgccgaggcgggcgacggggtccgcggcgccccgcgggaggcggcagcggcggcggcggggccgtgcggggcgggagcgcgctcgaccttgagcggcgcgcggccgccgctgctgcttcgcgtgctgtagaggcgcggggccacgccctcggcgggcggcgtgcgcgggaactccttgagcgagcggctcagaggcttggccttgccg

SEQ ID NO: 52165 - DNA, 565 bp, Mus musculus
  source 1..565: mol_type = other DNA
tttttaagatgcaaatctgtacatgtattataaaaggaaaggcttgtagatttctggtttcaaacatttttcatctgtgagatcttgtttattgtactacaaaacagcataactgtcttctcatctatgaaatgaaaactgaaaactaagacgttttactagaaagcgttcaatgatagagcacatgtgccacagcgttgcacagtgccactacaggaagcaagtccatccttaggatggacggacaattgcttttatagcaaggtgagggctggggggaaatccctcccttccagaaaagcttgtgggtttgaatagacacatgacacgtatgcgttacgtgacaaacactgagcagtcgggagtatacagtgcatgctcgacagggcctaggatctcctagagctggatgggctcccgggctgtgggaccacacaaaaggggcgcttcgcctgctcgcaggcccccacacccaggttctcgggtcgcgggcctccccagcctctggcgcgcacccctcctagccggaaaacccggagcgaaccggcccgggccagcggcgcat

SEQ ID NO: 52166 - DNA, 150 bp, Mus musculus
  source 1..150: mol_type = other DNA
tggcacagggacactgggcatcttcttgcagaagcagggtggctgctctagatcaagagtctagagtcaaaatgggatttgctcaagatccagcctgatgttgggcgcggggccgggcgggaggaggctcccgcgggggagaggcgctcg

SEQ ID NO: 52167 - DNA, 414 bp, Mus musculus
  source 1..414: mol_type = other DNA
ggacattaaggcacattagtctttaggtccctaaagagattagaaaagcatttttgtggacctcgctacagcttttggaaatgggtagtagttaagtttactaagaactcaacagtcgcggctacgtagcttcccgccccgggctttgaaaaatccgtgtcactgtcccccgaggtggggacctcctcccctaaacctagaagaaggctggggctgggaccacaagcagcgagtctggcgcgtccggcgtgtcccgaccgggcgcgcgagccgggggcgcgcagggcccgccgggagcgcgcggcctccgggatggcggctgcgcagtggcgagcggtgcaccccgagcgaggggctgcgggcgcgctcctctcctggtgggtgtgacccggctcggcgcggcggcggggggcg

SEQ ID NO: 52168 - DNA, 598 bp, Mus musculus
  source 1..598: mol_type = other DNA
cttcctcgatgttgaataagtaatattcaaatggcagattgcagctgtaagttaaattcatctgaaggcatcactatgtatgtatgtgtgtatgcacgcacatgtatgtatatgcaggaaaatatgtgtgcggcgtacatgtgcatgtgtacacatagaggcaacctcaggtatctagggtgagccaccaaatgaaacaacttagagctgaccttttgccccaacccttcaggagctgaccactggttaaggggcaagagaatgtcagttacccactggctaatatctgattcaatatagaactacatagctaatttaatgttgttgaattagagatagatttttattctatctatatcaaattttgtcattttaaaactcaagaggtttttctttaaaaaaaaaaaaaaccattcaattagactaaaatggcaattcacacaaagacattttgctggagaacaagaatttcttctcttgatcctgaggaggctcgctgtagtttccgggacgccccatagagggcgggcctgcaaaggcgacgctccggtgcgcgttccactgaaggctcccaggcgcgctcccgagctcacgtgac

SEQ ID NO: 52169 - DNA, 335 bp, Mus musculus
  source 1..335: mol_type = other DNA
caatgaatggttcgtcgattggtctgtagtttaaaagccgcacaccacagagatctccgctggggaagcatctagtagctagtatatatgtcttcttagctagatatgaaggacgcactgcgggggggccccacagtcaggggagcagaggagaccccggtggttgtcaccgccgccctcccggcttttgccaccgcaaagcacccgggggtagcacgcggggtccgcggcgggcccggctcgtgcgagccagtgcgaggctgcgggcgggcgggagagcgagggagggagcgcagcgcgcgcgccgcccggccccggccctcccagcccgccgg

SEQ ID NO: 52170 - DNA, 352 bp, Mus musculus
  source 1..352: mol_type = other DNA
taagaggccccctctctacttgtcagggcaagatttattccctgattagggattaaatcagtatcagtgataatgaacaagcttaacaattcttattcatttaggtaacagtaaaaacattttctaaatccttttttctcatcctttaaggtgaatcatcgagagggttgtctcgagaacctagtaattagtaattcacatgtaattcattcactcattcattcattcattcattcattcatttaataaatgtctctcaggtcattagcatcttattactaagtctctaaactttgcgtttgaatcaggtaggagagctgccagatagctttctcgacgacactaaggacag

SEQ ID NO: 52171 - DNA, 514 bp, Mus musculus
  source 1..514: mol_type = other DNA
tgactcacaaccatctgtaaccgggtgaccatataaatttaaaaaaaatctttaaaaaataaaataataataataaaagatttgcatgcgtgtgccagaggtcagcctcaggtacagtctagcacttgaatttgcaaataaattaaagcaaggcctaaatttagttaggtgacttcatagatttgagcctagaactaaggtttatttaaaaactaatagtctgtgctatagttcctcataagacttgggtaagacgaactcttttcatccagcattacgcttgcttgcgaaccccaagaaggggaatctttcctctcaagaactgtgcttcccagagggaaagaatcccagtttcgggctggcactctcaagagttctctgcggctgcggaggcagggcagagagggaggggcgtgtcgcgggaagccccgccccgttccgtcacgtggggcgggatcggaagcgtgacggcgtgcgcgggggcggagccgtggctgcgcgcgggcgcgggggc

SEQ ID NO: 52172 - DNA, 444 bp, Mus musculus
  source 1..444: mol_type = other DNA
atgcactggcgttgcacacattccacagacagatgtgcgtggacccgaattcttccctcgcgctctcgcaggtgcggggcagcctccccagtgcgccgcccggctgcactgcactaggaggcagcgtacccgggccttggcggcttgccccttggagcccgggtcccgttatccagcctggcctcgggcttggaagccctgcgcgcggccgccccctccccctcccccgctccccaacccgagctcggggggccgcgcgccgggcagggccggagccgcctccgcgccgcttcccaggcccggctggccgcgggaggaggtcccgctgtcagtcagcggggaaggccggcccgggcggccagagggggcggcgccgaggactggctcggccgggcgcggggaggcgctggcggaggggcgggcgcgggggtggctccgggcctt

SEQ ID NO: 52173 - DNA, 427 bp, Mus musculus
  source 1..427: mol_type = other DNA
ggttgttggttttaaaaccccacccttaagacagggtcttaatagattaacacccactttttttgtaatgaaagttttaatttcaatatatttattttgggattagcctaaacatgaacatttgcatttataaacttaaccatgccagttacaatataaaattcaaagtataatacatgaaggctattatgtgtaagaaataacattttctgactttaatggtaggcagtctaccacttgccttctttgcaagcaagcaaatgcagtacttcatcccaggcgggtcttgaactcacttcgcatcaagcccttttaaagcttttaaaatatatttgtaagacaaactcatgctatgttgtctgccggagctgcttcttcagtaacgcctggttttcaatactaatctagtttcaaacatcctttaaat

SEQ ID NO: 52174 - DNA, 188 bp, Mus musculus
  source 1..188: mol_type = other DNA
aagagctgttgggcgggacctgggcctgacgagaccccacccacgtcctgggcccgcccccgctctaggccccgcccagaactcgctctgaccgactacaggacgcttgcgcacctgtcaaggcgccttggcactgcccacatccaagctgagttttcgggaagcctgaacacagcgagctttgggcg

SEQ ID NO: 52175 - DNA, 587 bp, Mus musculus
  source 1..587: mol_type = other DNA
gcatttgaaggccggtgccgcagtcgcacgggggtgacattctggtcttgctacccgactccaccggaggcatcgtgagagcggtgtaggcgccttcttaggacccggggactagggcgagtccgttggcccatggcatccgcgcggccgccttcggagcgcacggcacgtggggtgccccacgcgcggagaggatctgcaggcaaagccgcgactggggcgccttagaagccgaccagggtttccaacagtctctggcaaaggctcatccagacctcccttcgggggactctttaaaggagcctgggggaggtgtgtccatcatccggatggccccggggctccccgcagctcgcatcacgccctgcgcacccctcccggccactgcgggcgggggcgcacggcgtcacgaggcggggagcccgaggtccggggcggggcgccggggaatcccagccggagcgagccgggaggtgcgggcgcgggcgggcaaggaggtgcgcgcggagggagcggagcgcgcggagccggcgggcgaggaggaggacggcgagggaggccccgcccccgcctcccggagcccgctc

SEQ ID NO: 52176 - DNA, 507 bp, Mus musculus
  source 1..507: mol_type = other DNA
gcaaagatggcgctttttgacataaaactagttagctgaccctgttcttctaccggcaaaggaagccctcttgtgctgaaggcctccccaaagcacacgctgtacacaaagcctgtttagaggcagggagttttggcacagccacgactgacctgccagtgtggtcgtagggtcttcttggccccagggcctgtaggctctaaagccaccaacaagcatctgtcgcttgcattggctgcgagagagacgctcggagtggctgaacctctgtccccaaccctggtgtgctaccccgaggctagtgcgggtggcccctggggtcttcggccccccgcagcccgccgccccgttcccgccgtgctccggcctcccgggcccgctcggcgtcgctctgccggcgctgggggcgggcacagccccctccctcggtgtcccctccccgtccctccccctcccccgtggcgaggcggcggcggcggcggcagcggcggcggtcgaggctgaggc

SEQ ID NO: 52177 - DNA, 365 bp, Mus musculus
  source 1..365: mol_type = other DNA
atcttcacctgtaaaggtcttcacatgtgggtggcttaaaacaacatccatctgtaatcctagtactgaggtagaaggatagattctgggtcacaaagtgatttcttgtctcaaaaacaaaaatccatggcagagtttgctcattcctgcccactactactaggcgccagggctgccgagctggaccaggcccaatcacatctgcaggactgggccagacctccgtgctccggaggagactggatgcagcctgtacaatgttttgcatcttacaggggcagggcaagtagtctcagactctagagctgccccctcagagtggcaggggatctctggtaacctaattaactaggtggccaacagga

SEQ ID NO: 52178 - DNA, 240 bp, Mus musculus
  source 1..240: mol_type = other DNA
tcccagaaacatggggagaatgagaaagtctgagtgtagacccagtgactttgcacccaagttatttctcattggtaaataaagaagtaaataataacttggggttattgatagtagattctaatagcatagtatctgccagattgggattaaaaaatttcaacaacatatgtctggtaggaagaatggaaggatgctgctaacatgactcaacccgctctgcagcccccaattcaggct

SEQ ID NO: 52179 - DNA, 583 bp, Mus musculus
  source 1..583: mol_type = other DNA
gccaaggctgtacagtccccgagaggaggcgtgaaggaagtgacttcctctacccggacaccccgcgccactcggcgcctttggcccaggctcaaggtcttggctctgccccacaggccgcagcgctcaagtcctgtttactgagcctgggcggggagaggggcggagaaacgcgccaatgctcctccaggcctgcgtctccacgtgcagccgggccggagctgccacctacgggacaggccgcgacccccgttccgtgctgttttgctgttcccgcgcgcggagcaaaaacttcggcccagccggatcgggcgaggaaaggcacgtcccgggtagccccgtcctgggcagatagaacgtgtacgtgctttccgcgaggcgccgccgccaccggacccaagggggccgcacgccccacgccgctcgggacgcccaggctgcccgcccctcctcccccgaaggggaaaaattgggagcctgacgtccgcgggctggcgggcggcgttgcctggagaccccggccggtcagcgttcccccggtgcgctttgccccgccgccgcgccgctccggggctgtataaag

SEQ ID NO: 52180 - DNA, 279 bp, Mus musculus
  source 1..279: mol_type = other DNA
cctgagtccttggcacaggaagccaggcaagtgctggctggatctctggttgtaaagtatagaaacaaaaaggctttttgctggctatagagaacaaagagcttctttctagcttttacctttcaaggagaaacgctttactaattttcatagttttaaagaagttgtgtaaaagatgcagcctttaaggcagcgtttaaggctcgattttgcctgtctctgcgctgggcacagtgaactgacacctagaggtgttggaggagcggcactcggccgctc

SEQ ID NO: 52181 - DNA, 227 bp, Mus musculus
  source 1..227: mol_type = other DNA
ccaagactggcctctttaggcccctgcttgggatgtccagatttatctctcacgcaatatgcttttgtgcgatttgcaaaagaacataagtagtgcttacactagtttggtccatacttcatcaggccttctccgaggggcaccgggaggagctagagttgattagctactccggccgccaatcccgcaggaggcggcgctgtcccggccgctcggagctccgagtg

SEQ ID NO: 52182 - DNA, 274 bp, Mus musculus
  source 1..274: mol_type = other DNA
ctgtattgcccagagcaatactctatataagtttgtggggattcctgcctatgtataaagagaacaaattaagtatgtaggagaacacatacttcattgacttattaataaatccactgcttcatacggcaggcagatttctgagttcgaggccagcctggtctacagagtgtaagaaaactgggcaaaaagtttgcacaccttgttccttgtttaaatgcagtcttcccatgaggctgctctttgggacgcaacctcggccgtgacgtcgttg

SEQ ID NO: 52183 - DNA, 206 bp, Mus musculus
  source 1..206: mol_type = other DNA
gcagcttctcagcctcacacagagcttactacataaggtctgacagtcaggaagtgacctcagaggtctcctggctcctgagactgttcccctcctgaggagacagggccctgccgccccatttccattctacttgaagtccaggtggtacattaggacaggaaagaaaagtcagtctgacactgcctccccacacaccgtgtgtt

SEQ ID NO: 52184 - DNA, 213 bp, Mus musculus
  source 1..213: mol_type = other DNA
tgttgtccttggaggtataatgacgcttgaagtgaaccctgcacggcttcaggcagggcatgttttaatgtccaggctctgccctgtcagagagcctagaggacacatgcaggacacctaagctgtgccgagcctctgtgcccgtgaccgaaccttgctccagggagctcagagaccgtgaggccctctggctccctctaacacacggtgtgt

SEQ ID NO: 52185 - DNA, 415 bp, Mus musculus
  source 1..415: mol_type = other DNA
ttcaataaatgctcaaagcacgaagtgtcttcaactatttgactgttcacttggaaacctgttcccgggttcacacgagtgcacagggaaccctttcagttgcgagctctgtgagggcaagaacttgttttccactaccttagttgcttagtgcattacttcaaccttgacatttaaaattatacgacttattagaatccattgatttcatgaaaacctggaggtccacagcctagctacggcaggaactacgtcactgagcagctagggcagcggctcggtagcaaccgaggcgcaatcgcacggtcggcccttcagcaaccctcgggctcctagttggccccccacaagcccttgcgcgcgcatgggcggagccgacctctagtgggctgctgagagccggggcgctggtgtc

SEQ ID NO: 52186 - DNA, 516 bp, Mus musculus
  source 1..516: mol_type = other DNA
gtttctttagatgtacggaattttgtctaaatcaaatagtgcctgacacaaaatatgtgctcaataaatagtactaatgctgaatgagagaatgaattatattctatcatagtgctctatagtaactcagagtaacttcctctcgtatatccattcaataaatgctcaaagcacgaagtgtcttcaactatttgactgttcacttggaaacctgttcccgggttcacacgagtgcacagggaaccctttcagttgcgagctctgtgagggcaagaacttgttttccactaccttagttgcttagtgcattacttcaaccttgacatttaaaattatacgacttattagaatccattgatttcatgaaaacctggaggtccacagcctagctacggcaggaactacgtcactgagcagctagggcagcggctcggtagcaaccgaggcgcaatcgcacggtcggcccttcagcaaccctcgggctcctagttggccccccacaagcccttgcgcgcg

SEQ ID NO: 52187 - DNA, 145 bp, Mus musculus
  source 1..145: mol_type = other DNA
atgaggctctgattggtcagtctcgcgagagaggcggccaaactgcagggtccgcagactgcgcgttcatttaaaaaaagccgaagtgattggtttcttgggtgacacacgcggcgtcccaatgggtgcccttggggggcggagc

SEQ ID NO: 52188 - DNA, 491 bp, Mus musculus
  source 1..491: mol_type = other DNA
tcactctgtagaccaggctggcctcgaactcaaaactttttttaatgaaaactaaaaagttggttaaattctctgatttgtaatgtaacagactttcaaagtattttaagtcttaaatagaatcacattttcttgattcagtgtaagtgctccaaatattgaaaagaattaggagttactatgttgcttgagggtatctatattataaacattcacctctgaggtaagggtagtcttttatattttcctacagttgagaaaaaaattaacccaaaatgatacaagtttaatatttgggatattttctgggctacaacctacagaggtgtaaaatgttcaccatggtaaagtatttaatatacagctccttctgttcaagagagccagtgactctagttctctgcacagcacagagcattagttttctctacacatttaaaactgatcagaacttaactgtttgttctcactgttgcctaggctgccatgga

SEQ ID NO: 52189 - DNA, 406 bp, Mus musculus
  source 1..406: mol_type = other DNA
ctacacttgtcaatgattaaacaactgtgtagtacaaatgccaggaagtgcttacaagaatgtttgagcacacatacagagctgtctggagtcagcctggcctccagatttaaaaaaaaaaggggacagccagtttctccttattagttcaagatcatttttatacctagctaaagaaagaacatgatgcttcaaccattgtaaaacagatttaacactacccatttctttaataattggctcagtggcaaatgtaggaccacaattgtccatctcgaaaactcatcaaaatccccaggtggaattctattccattggccaacagtatactgtaggcagttggtactcacacaagtagcatcttacttggctggacaaagtccagccatgattatttataaaccat

SEQ ID NO: 52190 - DNA, 512 bp, Mus musculus
  source 1..512: mol_type = other DNA
tcacggatctccagagatgtgggaccaagcacgagagctcgctctgtccagccccgccagagtctctcccatttttggtgggacaggggcgcttctcgcttggctcccgacaaacgggctgcctgctacctgcgaggggagtggccacaggcagggcaggcgagcgctcgcccttacctgtcgcagaagctgccaccggacggcccccttgggcgccgagaccagcgagccctggctggcactgcccatcgcgggacgcttgcccgcctctgcctcagtctctgcagccccagcggccgcgacctgcgactccatctccagagctgactggacccggaggttgcgtccgccacggctctccccagtcaggacctgccaacttcttccctgtcaggacctgtgacgcccggcctctggccttccgcatttccggttggcaaccaaagcagcggcgtcgcttcatcaccactttttctggtggccatcttaagtggcgtgctgcaaactagctc

SEQ ID NO: 52191 - DNA, 247 bp, Mus musculus
  source 1..247: mol_type = other DNA
aaatcttctctaacacgttccttggtagcacagaaacactgcgtcagtttatgtcgcagcaaaataatgggccagtggagcatgcttcctcgtttcccggttcccgaacacgtcgtattcatagagctgcagtcacctcagctcgcgccgcccagagctagtttgcagcacgccacttaagatggccaccagaaaaagtggtgatgaagcgacgccgctgctttggttgccaaccggaaatgcggaa

SEQ ID NO: 52192 - DNA, 149 bp, Mus musculus
  source 1..149: mol_type = other DNA
ctcctcaggaagagttgagcagctcccagcccaccctcctacgctggtcagagtgagtgccgctttcaactaaatgtaggtcctggactgagccggaccacagtagtgcccaggtcgattcagttccgagcccaccggctttaagagcc

SEQ ID NO: 52193 - DNA, 329 bp, Mus musculus
  source 1..329: mol_type = other DNA
agaagaaaaatcattgaggaattcaaaactttttttaaaaagatcttttctacattccgagatctgggggcgcggcgccgggtcagctcaggggccggctctgggcggtcgctctttgcgggcccagaaagagcccaaaggttgggacacaaaaacagacacttcatcttttcttccggaccccaactgcatcccccggagccggggacccaggcgccaggcgggcgggtgaacccggccagtccctcccaatccccgcaaccccccgcctccgagtgggggggatccaggcctggagggaggcttgccgagggctgtgccgacagcgc

SEQ ID NO: 52194 - DNA, 268 bp, Mus musculus
  source 1..268: mol_type = other DNA
tgtacccatggtaggaaaagtgggcatcctcccctaggtccagagtccctagtaccactgtgagtgtaatgtctccactgttatcttcaccaatttgctacggtgacttcctgaccagtggtcacatagacagaaggaggtggcgccaggtcaggctggaatttttgatcaaaacttctttgataagagttgcaaagattttttttaattctgtggcagggctgacagtgattggcagtggttgccgtggcaacgccacaacgacacg

SEQ ID NO: 52195 - DNA, 466 bp, Mus musculus
  source 1..466: mol_type = other DNA
ctgagtccccgcctggcgaggagcagatcgcgccgagtgggggcggtaccggccgcggggcaagcagcctgagcctttcagtcagctgcgaccttccgagcgacgcagtgacccagccggagctggagcacctggcgaagcctgggttgcgacgcctcttatttaaaaaaaaagggaggggtgtctcacactttttctctgtctcggggccccagcccggctcctctccgcctcccgggctctgggagtgcctggggctcccgtctcggccaacctccgctctgtgcagagccggggcgatctgtcagcggagctggccgaggggggcgggggtgggagccgcccgggccgccggggctcgggttaccggtgtgtctggcgcgggcaggccccgggtcagataacccgaccaatcagggcgcgggccgccgcgcctcatgcccgcttagaataatattattaaaaa

SEQ ID NO: 52196 - DNA, 278 bp, Mus musculus
  source 1..278: mol_type = other DNA
ctgtgcctaggctcgtttaccaatgacccagtgaaaaaagcaatttgcataaatcttcttggaagtatctaagaggctctgcttggcagtctatcaaactgctgactctagctaaggacttagccactaaagtctttttcaaaaagaggcggacgcatatttgccaaatctctgcccctccctggaccagaggagcagtccgcccccgcccctggaccgcaccggctcaaggccccgccccggtagtgtggctcgaaggcgggacttccggcgtccgg

SEQ ID NO: 52197 - DNA, 353 bp, Mus musculus
  source 1..353: mol_type = other DNA
gtcaggtcagtttggccaccgggggggttggctgggcgctcgctgcacgccctagctgcgctcgcgatctccgactagcctagccacggggtcagggcagaggctgtggccgcgcctccctattggccgggacaggggcaggcagccagcgtgcggggcggggcttctctggagccccgcccccggcccgcccccagccactcccgcgcccctcgcgccctcccgcgggcgggccgtccgagtttttaaagtgggctgacagctcgagagcggccggtgtacagctccggagtccgcagcgctccgctccagctctggcggccgtacaatcctcggcagtgtcctgagactgt

SEQ ID NO: 52198 - DNA, 509 bp, Mus musculus
  source 1..509: mol_type = other DNA
tttcccgcagcccgaacgccggttgtcagggcgcggatcaagccttgtcctcttaaggggcacacacaaggtccaccaggccgggcccaggttctaaggggagagtctcccgaagggctcagcagtccgggtgtccccccagctctccgcgggcgactggtgaccgccgcagtccaggcaggcgagagaaaagcgcggcccgctgctctccgggtccagaccccgctctcctggtgcagatccgaggagcacagactcggcctgcgacagtcgctcccgcgcggagtgcgcgccacggcaaacggacccggccggcccgctcctgctccaaacagtggcgcgcgcgcgcgcgcgtgcacacacacacacacacacaagggagaatcgctcgcacagcgatcgagggaagcagatcgcgggctgagcgctctggcgggcggcgagccggcggcagccgagagcgcggacgcggggagcgcggcgggcgggcgggcgccggcgggcgggag

SEQ ID NO: 52199 - DNA, 384 bp, Mus musculus
  source 1..384: mol_type = other DNA
gggggggttggctgggcgctcgctgcacgccctagctgcgctcgcgatctccgactagcctagccacggggtcagggcagaggctgtggccgcgcctccctattggccgggacaggggcaggcagccagcgtgcggggcggggcttctctggagccccgcccccggcccgcccccagccactcccgcgcccctcgcgccctcccgcgggcgggccgtccgagtttttaaagtgggctgacagctcgagagcggccggtgtacagctccggagtccgcagcgctccgctccagctctggcggccgtacaatcctcggcagtgtcctgagactgtgatttgtcagatcccagaaaagtgactcctgttcggggctaaacggaactc

SEQ ID NO: 52200 - DNA, 295 bp, Mus musculus
  source 1..295: mol_type = other DNA
gtgcccagggagggagccacaagttgtccgaggcaattagcgtccacgaagaccggaagctgggggggctgggggaggggatccggctgcttcagcaagagcttcaggcagcctcactgtggagcctgcacggtggaagctggccctgtctgggcatgcttaagtcgttagacggctttctcattaaacagccttccgatgcagctgtatttttcattagtaaattaataaactggctgcaccccagagtggggccaactgcagagctggccagccctccgaaggggtagactgg

SEQ ID NO: 52201 - DNA, 149 bp, Mus musculus
  source 1..149: mol_type = other DNA
agaggctccagactcccacccagtgtgagtgggcctcgtccacccccaggggaaccagccctgttgtcgtgacatcatttcaaggcggtccatatatttatttggaggtgtgtgctgtacacacacacaccacagcgtgcgtgtgggca

SEQ ID NO: 52202 - DNA, 347 bp, Mus musculus
  source 1..347: mol_type = other DNA
tcccgggggcaagggtatgagtgacccacgcaccaccactatgaattggtgagaggaaagtggggtcagtcagcgcagagtgagcctttggccctggccagacaagtgtttccggacttgccagttctaattattgttattaattatatttataaccgatggctcctgccttccaggcagaatttaaatatacacatctgtataatgttgcagaattgtcgtgattccccgaaaggccttcacgtctcctccgggcaccggggcctgcggacgcttccgggctttggccgaggagccctgggctccttcctagcggctgcccaagagcccggcgcctcctcctcggc

SEQ ID NO: 52203 - DNA, 348 bp, Mus musculus
  source 1..348: mol_type = other DNA
tccaatttaacttaatttcagatagccactgaagtaatttttaaaataaaatctagggttcgaggccagcctggtttacagagtgagttccaggacagccagggctacacagagaaacaaataaataaataaataaataaaatctgtattaaatgcggcatgttttcaagatttaaacattattcgggacatattaataatactggaaattaaccattgcttataatcttaagaaacttatacttgtgacatctgtcaactcttgatgctaccgctccggcctatcccgtacctagaaagtcgcgggagggagctgatgggcggggctgctctcattatcccgcccct

SEQ ID NO: 52204 - DNA, 470 bp, Mus musculus
  source 1..470: mol_type = other DNA
tggccctggccagacaagtgtttccggacttgccagttctaattattgttattaattatatttataaccgatggctcctgccttccaggcagaatttaaatatacacatctgtataatgttgcagaattgtcgtgattccccgaaaggccttcacgtctcctccgggcaccggggcctgcggacgcttccgggctttggccgaggagccctgggctccttcctagcggctgcccaagagcccggcgcctcctcctcggcctccgcgcccgactcccagggagtcaagcttgggtgagcggcaggagcgcacggcgggcgcgggcgcggggcgcgccgcactccggagccgcccggaccgccctcccccaccccccttcaccggcccaggagggcgggggccggagcggcgcggggcgggcagagccgcctggcccctcccctccgccgccctccccaaagttgccgactc

SEQ ID NO: 52205 - DNA, 640 bp, Mus musculus
  source 1..640: mol_type = other DNA
tatcgttttcaaaagcaaatgatactgattaagaaaacttggggaaagtttctcagattctcccttccactgacaccggcgagcgagtccccgacccaggacacccacctgggaagccgccctcgggactcgcgatcccgtgagaacggggtcggaaggcttggctgctcccgagccctcctcctgagcagcctttgctcaggtgcggaccgcagctccaccccacccaggtggctccgtcccagcctcggacggcgcagtgtgggcaactggaggtcgccatcatagagagagcccgtgcggccgacccggtgccctgagagactgtgatagacgccggcatctcagagggtcggtagcgcagggcatcctctggtccgccggaagcgtggcgccctggaagtcaccgcagcggtcggcggtgcgacctgcacccgccccgggcgagtgtgagaagcaacccgccaccggcttacctaactctcccgcccgccgaagggaagggggacaccaccgcctcccaccctcaggtgctacaggctggcatggcccctggcgcaggcgaggggcgggataatgagagcagccccgcccatcagctccctcccgcgactttctaggtacgggataggccggagcg

SEQ ID NO: 52206 - DNA, 258 bp, Mus musculus
  source 1..258: mol_type = other DNA
agaccacggccggggctgactcgggttgaccttcttcggccgaacccggccgcttgtctcagctgcccgactccaaaatggcagccgcgcacagcacgtggattggccgccgggagtcccgcccacctggagccccgcctgccattggtcacggtaggctgcccttcagagaggcgtggcccagcccgccccccaccccgggaggtattttccattccggtggggggctctggcgggggcatccggccgagctggggt

SEQ ID NO: 52207 - DNA, 545 bp, Mus musculus
  source 1..545: mol_type = other DNA
ctctctccatctttgatgtaggtgcatctaaaaaaaatacgattatgtatcttcaaagatacaaagagaaggaattttaaaatgtacagtcctaagctcatatatctatctgtatctatacacattcactgaaagacaattttgttaatatcaaagggcaggatccttttttttttttttttttttaaatatattgtcttctctcaaagaaaacaacaaaacggctgcctcactggtgaggctggccagcttcggagtccgcctcctccggatcctgcagcccacaacccgtgacgttccggagcctcaggggcctccccagggccctagcagtagggtgtcgccctcgggaggcgggtctggccgcgccagccacaggggacacgtggatccactggatcgggtccggcagcggtgcgcgtgcgcggctgggcgaggggcgagcgaacccacgggccggaggcctgaccctcggggcagaggtcggtcggcctggggctcgcttcagggcgcagcgggacctgtggcccacggaggcagcctgt

SEQ ID NO: 52208 - DNA, 540 bp, Mus musculus
  source 1..540: mol_type = other DNA
acaatgcagtcaactacagggtacccagaataccaaattaatctaccttcagaatgagatggaatgaatggataatgttgaaatcttaatcttggaaactctctccatctttgatgtaggtgcatctaaaaaaaatacgattatgtatcttcaaagatacaaagagaaggaattttaaaatgtacagtcctaagctcatatatctatctgtatctatacacattcactgaaagacaattttgttaatatcaaagggcaggatccttttttttttttttttttttaaatatattgtcttctctcaaagaaaacaacaaaacggctgcctcactggtgaggctggccagcttcggagtccgcctcctccggatcctgcagcccacaacccgtgacgttccggagcctcaggggcctccccagggccctagcagtagggtgtcgccctcgggaggcgggtctggccgcgccagccacaggggacacgtggatccactggatcgggtccggcagcggtgcgcgtgcgcggctgggcgaggggcg

SEQ ID NO: 52209 - DNA, 525 bp, Mus musculus
  source 1..525: mol_type = other DNA
gaaaagcttgcctgaaatcattctcgaacgttttcggatgtggttttagctacatcctcaacccacttctgggcaccgctggccttagagcggagcagagcggagtcgggccgaagagcttagggacttgccccggccggtctatccgcagccctgcgggcgggcgcgttgcatccgacccggatccgccaagagcccgggaccaggactgtcctgtcggccgctctgcctcaggctgtggcggtgacggggccaccacacaaagccgggcggtccgggcggaggaccccaggccaagagtcctgaggggagggaacggggagcgaggcgcccccgggctcccgggctccccgcagcatgcacccagtcagcggcggggagccggcggagggcggcccgagatcgccgtgtgcgcgcttggcggcctcgctggcggtcggctcgcctagcccggcgggggatagccacgcccactttggggtggagccgcggcccggggaggttccgctgttggagacgcccggg

SEQ ID NO: 52210 - DNA, 756 bp, Mus musculus
  source 1..756: mol_type = other DNA
acctccatttcagggtagggttacccacgtgaccttaaaaggcagagagcacaaacttttctctttctctctcttctgcaaagcgatttttctcttgggacagacgactttcctaactgcctcggcaagccggagggtagcacccagcgccggctccgggacgggtcggttgagtcgcgcttcctggacgaggcggtgcttttcgcgcgctcgcgggcgctcgggctgtttcgccggttgctactgccgccgccggaaatgcccagcatctgcagatgccgggccagctgcggtcccactggccctcggcgcggcagcgctccacctcgctctccaccttcaggtgggtgccgtgcgcgcccttcgcagccatcagaccaggccgggggcggcgtccaggctggggagcactctccagcaggcttgacgggagtgcagacggcatccggggcccgggtggcagagggggcccgggtaacggcaaggggcccgcagcagcagcagcagcagcggcggcggcagcgcccaccgcaccgcctggagcctctggactggggctgcggctgcgcgaccccaaggcgtccagaagcagcctccgccgctgctgcagcagctcctgacgctgctgtctcctcctgtgcagcagctgctgccacagctcccgccccgtgcccgggcgtctccaacagcggaacctccccgggccgcggctccaccccaaagtgggcgtggctatcccccgccgggctaggcgag

SEQ ID NO: 52211 - DNA, 425 bp, Mus musculus
  source 1..425: mol_type = other DNA
aaaataaggttgaaaaactttttaaaaatctttctgggttaagaacagtggctgctcttccagacccttttctggcacacaagtgtacatgcagatagagtgcttatacatatggtggctcacaaccatcttctggtgtgttgtgtctgaagacaacaacagtgtactcacatacatacatacatacatacatacatacatacataaaataatttttttaaaaagctatttgtttaaaaaaattttttttctaggttgagaagctggcccactgggcaaaaggccttagccaaggggctagcctagttccaacttttgatagaatgggatcttaaagctaaatatgctaccagtttctcctgtctatacacaccgatggaggtgaccttcacgcgcgcaggcttggaatcaatcggcccgtggcc

SEQ ID NO: 52212 - DNA, 287 bp, Mus musculus
  source 1..287: mol_type = other DNA
gacagcacacactctcggatacaagccccttttttgattagcttgtcagctgagctatgcagcaacgctgagaagctgggctggaagaaggtcctccagccgagcgcagagagagccacgctgccgcctggcgcagttgccaggacagcgcggcgcgagcaaggcaaccgcgttccgcaacgaggttcgcctggtcgaccgccaccgcggtgctcctccgcgccgcaaagtagctcctgccaggcgcggttcccccttgcgtgtctgcccagtgactgcggagaaag

SEQ ID NO: 52213 - DNA, 421 bp, Mus musculus
  source 1..421: mol_type = other DNA
ttttaaaaagataccgtctttaaaaaaaggtggagtcagggtctccagagagcccaagttggaccctaactgcagagctagccgaggatggtctctggcattgcgggcctctgccaccaagcccacaaacccaggttttcatccccagagggctggaaatgtgtgcaactttattctccttgagatgctataaagaatattgtatccaaaattctatcagagatccccgcccaattctagtggggagtgttgaagatggcaaacttccagcttctccctcaccctgctgatctgagacaaaagcctggaggcttaaatagaaggccgggcctgctttttctcccgccagtagggcccacctgctggaggaccggtctgaactgaccaacccaaactgggggctgaacagtgtgtccgcccc

SEQ ID NO: 52214 - DNA, 349 bp, Mus musculus
  source 1..349: mol_type = other DNA
gcttaaatagaaggccgggcctgctttttctcccgccagtagggcccacctgctggaggaccggtctgaactgaccaacccaaactgggggctgaacagtgtgtccgccccgaggagaagcagcacttcttccctctgatggactgattctgcacgtgagacctgcggcggcggcggcggcggctgctgcagctgcagctgcatgtttcaagacgcatccgcgacatccggtccttccggggtactggaatccccgcctctggtccgggacagcgcacacctggagagggggccgcgggaggggcgtggccggccgccggggcagcagatccgcaggtccgctcccgcc

SEQ ID NO: 52215 - DNA, 357 bp, Mus musculus
  source 1..357: mol_type = other DNA
tagccaaggataatactgtactgtgtttcttgttccacatttaatatatatattttttctttaaattaataagtgtttgtttatttatttatttatttatttaccagacaataccagacaaggtttctctgtgtagtcctgacttccctgctggcctcaggccaagtgtctattggatgaattcgtcaaccgagcagtttgcactgcaagtgtataacgcacaaaaaagatagttctttgcggacttgaaagcgcagcctctggaaggcctgcaaggctgcagaagtcggacgcatgcgcagtagctagagtcctagagactcccacccaccggggcgcagcgctgcatggtgattg

SEQ ID NO: 52216 - DNA, 514 bp, Mus musculus
  source 1..514: mol_type = other DNA
ggtagggtggaggacacttcctagggtggtgtatccaggctctaggactggtgagctgggatagcatagaagccacagcagcacccggcctgtgatcctcctgctctggtggcccaagcgtccgcaccctggcgacacgctgtcaccccggtgccgggtgagcaacctcgcctacggtggagggggggggggtgcactgtctggagcctcccacccgcaggctgcggcaccgatgcgctgtccgcggtgctgacgccggccggtcgctcggtcgggagggggagcagacgccctggttcccgccgcgcccggagctcatagaggctggccggagtcctggagctgcaaatttcaggctagagcccgagaatcgaaagtcgggttcggctcccgagggcccccagtccctgaggcttgagaaaggaagacatttcgggcatccagaacggcagtgggacacctgctctggtgggacgcactgttgcggccagaacgacctggaggcttcgcaggg

SEQ ID NO: 52217 - DNA, 449 bp, Mus musculus
  source 1..449: mol_type = other DNA
tctggaaagagatttctcaagtatcttcagtacccccaaagatgaacttccggggggggggggctgaactttatcttcctaatgtggccctttgaaaaaaaaatctgtttttttgctattttctcctcagtttctaaaatataaaaaattctgcacacttatgctaaagggctcagataagactggactgcacttggcattcacaagtgccgctctgtacaatgctctgcgaacgcaccgtacgtggcaccgcaggaccgcccgcagggccaggtgtttccgcagcgagctcgacgcggcttctcgcagggtgcaccccgccgttcctcaaggcccgccaacccgagcttgggggctgggcccgccccgccccgcccatctacgccagggcacgtcgcgggcggggccccgcccaccgcgcaggccgacacgccttcggattggccgct

SEQ ID NO: 52218 - DNA, 681 bp, Mus musculus
  source 1..681: mol_type = other DNA
tttcctcctcctcctcctccgtcggggaaggaggaaacccgacgataagagaggaggctccattggctccgacaccgtacgggcgcttcccattggtcaggccccgccggcgccggctcgcggccctccccccgcgccccccggccagccccgcggcggggagggaccgacagggcttgagcggagaggctccggcggtgtcaatggctcctcctgccacggagcagcagcagcagcagcagcggcagcagcagcagcggcagcggcggcggcggcgctggggctgaggaggccccttcgccgagggtggggaattcctcgcagggcgctctttggggaggacgaggaacggaggagccgggcgccccccgcgcgctcccgccccgctcggctcgccctctccgagatccgcccactccccccgccgccgccgctgccggagacgccgctcgggagtcggcgggcccggctcgtctgctcggccgccgccgcgcttcgcctcgggctccccaggcggacggactgcgtccctcgcggccgccccgcccggcggcctcggccttgcccgtgcgccaggcccggccggcgggcctcgctcaagctccggtggtgcccccagcctccccgcggagccgggggaagctcacgcccggtggccccccggtccccgcgtccccggcc

SEQ ID NO: 52219 - DNA, 191 bp, Mus musculus
  source 1..191: mol_type = other DNA
gaacccttattaaagtaggttttgaaaaatctaaggctacattgttgcaggaaaataaaagaataaaatgtatctttttgagtctagctggaagcccaggtatccctcattatttaattctggaagacatttagcaagtaaaaaattgcctgtagatctggatgtagaactctcagctgtttctccagcaa

SEQ ID NO: 52220 - DNA, 559 bp, Mus musculus
  source 1..559: mol_type = other DNA
ttcactgccaaggatgtaaagggaattcctgaaattgtagagttggcagattcattaacattaaaaattattctacatttgtctgcaattcagaattaacaatacagtgtaggcaatacgtgtacaatgcatattaagtccttattactgtacacagcaattagtgagagctctgtattgggagacagagtctcagaaaatctttagtaaaatttggatctgattccaaagaaatctgctctgcatagagtttccacggcacttcagtcagaagaaggtagcgttgttctcaagaaagcttccaaggggctgttcgggccgtcgcggcagccccagcacacgcgtcgcgggcggacactcgcgcgtcccgcgccagctcgtccactcagcagccgcgccgcgcctcggtcgccctcccataggtccttccgggcgacaggcgagggcccccccacccgcctgcaggacgacagctcggaggggcggccgccgccctggtaggaggcgggacgagggcggggccaagcgccttggcgccgcgttgtcatggcagcggggc

SEQ ID NO: 52221 - DNA, 513 bp, Mus musculus
  source 1..513: mol_type = other DNA
cagctgcacccagtgcattagcataatgttcatatgtatgtgtttgtgtacaaatgtagttcattagtttcaactgtcatattatgtctcaagaaacacatatctttcttcattcatattattctaacaagaaatacttcatgtcaaaaatattttaaatgaaaaggagcagtttttcatcataaggtatctcaagatatctagtctagccgttttttttttaaaaacaaaacaaaacattaatggtctttacattagaaattttcagaaactgtatgttctaggttttctgatctcaagaagcaagcgactgacgctaggcggttgctatgggtagccacggaaacgggtcgctcttcccgccgcacaggcgggtccgtcgggccgcacatgcgcgaaccggagcaccagagggcggggcggtgatgtcaagacgtcgccccgcccccggtggtcgccccgcctcctcctccctcccgcctggaaacccggaagtggaggaggaggaggcgc

SEQ ID NO: 52222 - DNA, 309 bp, Mus musculus
  source 1..309: mol_type = other DNA
ctctcccctggagcccagggccccgtctccagagctggtgtatacacacagtttttagaacttaaacactgagcagtctggtcagagagcatctgtcactactctggtatttcctgtcacatgaataaaatattgcacatctgtgattgaatagtatggggtgcgcaacatattggcctgggggcaaggcgcactcttcaagggaaaacttccctgggactggtcaccacaccatcacagcaaattttttttgagggggggggggcaaccctgaggggcttcactgaggcagctttagattgttcagca

SEQ ID NO: 52223 - DNA, 147 bp, Mus musculus
  source 1..147: mol_type = other DNA
agctttagctattaaaaaaatttaatgttttagggcagtgaatctcattttaatgcccatcagaactatctggagaccagtgcccactcgcacagctgttcctacggagaactagttacagaaaacaggaataacatcttctgccct

SEQ ID NO: 52224 - DNA, 278 bp, Mus musculus
  source 1..278: mol_type = other DNA
agaaaattgctaatatttctagagttgctgtaagatcaggttttcttttgaccagaaactgtataccttgttgggtattatgttccttgtaacagacatgatgtgcggcaaggcatctcactttgttaactaaaaacaaactgaattttgccctcaagggcttcacagtgcagtggggatatatagtggcactttggctcttccgatgtggatatggacagagacatctcaggggcgggcagagggtacgggcgggccccccgggcggtccagcatac

SEQ ID NO: 52225 - DNA, 452 bp, Mus musculus
  source 1..452: mol_type = other DNA
ttagcgtagttactaagcttaaaaatgccactgttgcaaatatagggtgtcactcacaggaaatctctaaaattaaaagtatagatgtgatacatttattcgtgccaactcttgaattatgaccagaaacagcccatgcctgaggtctcagaagtgaattgtctgctaacacttgcttatgttgttaatcacaggctaactatagcccagatctatggtttataacagaaaaggtaaattttgtgcagtaaaataatgtgaatctgctgatatcagtccattagactgatatctctaaatatgcaccaagtttctacttgttgtcattttggggtcaagtgcttattgacaaatattaatcacatttcaatcatgtattaatacatatagttactacggacacatattaattttacttgcctggaagcgacaaaagaaaaaaaaaaaagcat

SEQ ID NO: 52226 - DNA, 518 bp, Mus musculus
  source 1..518: mol_type = other DNA
atgttactaggcgtttatttaccgaagaattatttttaaatttcagcaagaaagcaaataataatagtaacatgcttgttctttaagatttggaaagcaagatgcgtgctgcctgcttgtttgtttttatttttaatgatcaatcaaacagtgtatttattagtacttcgtctttaaaagagaagagttctaattggcaaaaagcacaatgtatttcttcatgttgcataattgttgacttggaaataacattgtaattgtaattataaagctcataatagtcacaattataggcgtctaatttagtcagcgcggactgggctgtgtaccaacagcctcgtcaactgcagacggaactgcagcatcccttcctgcagtagcgcgccagccattggctcctctgtgacacgtgactgatagaggctgcagggcactgatacatcttgatctcccactgagtcagggagctctcctgtcagtattgatttcagaatttcctaggatttccattaagaatt

SEQ ID NO: 52227 - DNA, 241 bp, Mus musculus
  source 1..241: mol_type = other DNA
aggatgccctcagcggaagtctggtctccagttgttgagtcctgagtggaatctccacaagattttcgtcccctgcaaggggaagatgccaaggtagagacaccttgttctcagcatctgaacttggaaggggctgcagctgccagctgaggccaccctttccccagccagagcacgggccggccgctctccatggtactgcggagagctcagctccgcccttctctttcagaaggacagc

SEQ ID NO: 52228 - DNA, 164 bp, Mus musculus
  source 1..164: mol_type = other DNA
aaatatctggtatttctactctaaaacaaatctgtggtcaatgcgtaatttaaagccacagggcacagaaatgcctactgagcatgcctaggatgccctcagcggaagtctggtctccagttgttgagtcctgagtggaatctccacaagattttcgtcccctg

SEQ ID NO: 52229 - DNA, 306 bp, Mus musculus
  source 1..306: mol_type = other DNA
actgccaaagcttcaaatttagaggctgtggtgaaaattaaaccagtggcaaatttcaacatttgcagcatctcagagacagactgtagactcattagatatttactgaaaatccttataattctttcctttaaaacacaaaacgacttccatgtttagtagcctatttgaaaaagcatatatcaaaattaaaattattaataggagatctttctttacttgtctttgagaaatcagtgaaatcgaaaaccatcaaaataattggacttcttaaaaattggatttcttgacaagaggtgtctcctg

SEQ ID NO: 52230 - DNA, 369 bp, Mus musculus
  source 1..369: mol_type = other DNA
aagatgcagcatcacgccgcggcacagtcagagctgatcccagctcagcagttacctttcgctcagcttctggtcaacccacggcggtttcaattttaaagtttccgcccgcgctgacgtcaggattgcgacggcgagtatgcatgcgcaaacgctcagcgcccgccctcgtcgccggaagtgtccgcatcggcggctgccgggctcctcccaggtcatcgtcggtgtcggcgacctgaagggagttccatcctatccgggaagctggaggacgagtagtgctgtcgggcggagcggcccgagccctcctggagtcgatcgtcaggctgcctcaccaagcaggcgttgccagttcccgcacccagcgca

SEQ ID NO: 52231 - DNA, 300 bp, Mus musculus
  source 1..300: mol_type = other DNA
gcacctggcctgctgtagtggtagatctgaccacccacttttaaaacaagtatcaaaataatgtctatgttggatgcactcggccctagcttccattgaggaagatgcagcatcacgccgcggcacagtcagagctgatcccagctcagcagttacctttcgctcagcttctggtcaacccacggcggtttcaattttaaagtttccgcccgcgctgacgtcaggattgcgacggcgagtatgcatgcgcaaacgctcagcgcccgccctcgtcgccggaagtgtccgcatcggcggctg

SEQ ID NO: 52232 - DNA, 357 bp, Mus musculus
  source 1..357: mol_type = other DNA
tcgtttttatgttctaatgccattagtttggagaagtaaatgagataatccccatgaattgctgtcacagagtctgaaatgtaataccttctaatatattgcgctgggtgcgggaactggcaacgcctgcttggtgaggcagcctgacgatcgactccaggagggctcgggccgctccgcccgacagcactactcgtcctccagcttcccggataggatggaactcccttcaggtcgccgacaccgacgatgacctgggaggagcccggcagccgccgatgcggacacttccggcgacgagggcgggcgctgagcgtttgcgcatgcatactcgccgtcgcaatcctgacgtcagcg

SEQ ID NO: 52233 - DNA, 262 bp, Mus musculus
  source 1..262: mol_type = other DNA
taatgaggctttactggatattaaaactggcattagtaatacttatttcttcagaattctgggaagtactcgtgaactgaacaagtccttgatttttctacatacatagagaaattcatcctatgagatgaggtcatttttctgtctaacaatttcatacctttttggtgaaaaggatccaccttgaagtcagacctgagatctggaaaaggtctgacccagaatcactggccaatcaatccccgggcggacctgccagtca

SEQ ID NO: 52234 - DNA, 374 bp, Mus musculus
  source 1..374: mol_type = other DNA
attaaagatttcaaagtgaaaacttatgtagttctttttttttaattttttaatttatttttttatattttattttatttatttatttttttctctatagttagaaaacatgaaaataatgttgtcatgactacctcatatctttaagggaaaagaaagattaaatgtaattccaatataaaaaaaaaaaaaaacagtgtattttgtttgagagcaaaggatcttatctggacagctttgtacatacatgtccttctcaattgatcgtttaagatgtaagtgaaagaaattaataagcctactaatttctataaagtattcctaccttgagttcagacacagtgtaccttcagcacactggtgctcgagtcact

SEQ ID NO: 52235 - DNA, 277 bp, Mus musculus
  source 1..277: mol_type = other DNA
tttttgtcagagctcatatgaaaagatttttatgtcaaaagtgagaaacaagaacagtgagctgcacattgatggcagtgataggctggtgacgtcactgtgatgtcagtgctcctacttatctacattaattttgtttttttaatataggatttagaaatttttaggaacttttgattatgcataagaagtttctaataatttatctgcaacctgttggaaattcagcctagctaccagttaaaatatttgttgagttcaaagggctgacgtcatt

SEQ ID NO: 52236 - DNA, 512 bp, Mus musculus
  source 1..512: mol_type = other DNA
tttaattcacttagaattacaaactgaagctagcatctgatctgagcatgcaccatttcctaagtatcaggagaatgttgcttataaccaacaatatttgaaagaataggtaataatacttcaaatcttcactttttctcctaagtaatttagtagagaagcctggagagtactctttcaggggccacagactaggttcccagcatatggtgtctcacaaccttggaactccagttctaagagacccagtgaaggatgcatgtagtacacagacatacatgtagccaaaacatccatacttaataataaagggatgcctagatttgaaagccaaaataaaatacatttatgttggtaatcttttactatgataaagaagctgatggttttcttattgatcccacttagaaagtaacagtggaagcaatgatagtaaatagaatataatatattctcccaatatgggattaaaataacttataattatctaatatttcttcttttttttctat

SEQ ID NO: 52237 - DNA, 498 bp, Mus musculus
  source 1..498: mol_type = other DNA
atatatcttatagatttcaaacatttcactttgcaaagccattttcaaatagttttaaaagtaataaaatactagtaaagtagtttcttaaaaaatttctgtgaaaattaacaccttgaggttcttttattactcaagatagaaactcccaattttcaaggtctttgagtggtttgaagaaatcaaaatgcatagtgaactgaataatattaagaaaagtttctaaaattatagtgtttgacaaagcaaaaggcttgaaatttctttttctccctctctctctcatatgtgtgtgtgcgtgtgtgtgtgtgtgtgtgcagaaacaagtatgtacatgtggttatagaatatcaaaatgactttttcttgaactaatattgaggcagtaaaaaattgccacatgcaaaacatttcatttatcaaaaagtaatccaccacatttaaattttcttcagttcctcttaatcagttaaagaggaggagccctgttagtagcca

SEQ ID NO: 52238 - DNA, 371 bp, Mus musculus
  source 1..371: mol_type = other DNA
ttctgaaattgtactatctatttcaattttcactagagatttccaacttagttttaagaacgaaagtccgtttaaggaccagactctcttgctaatcacgtgtgacaaaatctcacgatcgaaaccgaaattttccattattaataggctcaaaaaaaaaaaaaaaaaaaaggtcctagcttttggcggtttccagaaccatccttgaagccggggaactcggcaggctttagcgcctagcacgcgcctccggcggagcgaacccacagcacgagcgcacgcgcggaagttgtgcaatcccgctgactgccagcagggggcagagttcgagtccgacccagtccccttagagaggcgatcggcgtggggga

SEQ ID NO: 52239 - DNA, 298 bp, Mus musculus
  source 1..298: mol_type = other DNA
ttgctatgaaaatgattttttaacctaaggaccactaaaaatgtctttagaaatttccagttttattttgaggtaattaaataacaaaggcgtgtctgcttttgtcaacaccgtcctttcaaagggggagtttaaatatcaagacatatttaggtctttgaatttgtctggttcaattacagcctgggctgtaaaagccaggccttcatactttccaaatttgggtacttcaggtcgattgcctcattgacaagtatactggacgatcaattactttgtcaattgattgcaagggtgc

SEQ ID NO: 52240 - DNA, 333 bp, Mus musculus
  source 1..333: mol_type = other DNA
ttttattttgaggtaattaaataacaaaggcgtgtctgcttttgtcaacaccgtcctttcaaagggggagtttaaatatcaagacatatttaggtctttgaatttgtctggttcaattacagcctgggctgtaaaagccaggccttcatactttccaaatttgggtacttcaggtcgattgcctcattgacaagtatactggacgatcaattactttgtcaattgattgcaagggtgccccagagctccggaggacgacagcctcgggagcaggtaagtggcggcgccttgctccgggcaccccccgtggccctggggcggtggcggtggccg

SEQ ID NO: 52241 - DNA, 466 bp, Mus musculus
  source 1..466: mol_type = other DNA
gggtccccagtctacccaggagaatccagcggctcctactgatcaacagtctgtctgtctggcgcgggcggatgcgccggagggagccagggagccggcagagagccggctgccccttctcctactcctcctcggccacgcgcgggcgggcgggccccaatcctggctccgggtcttggagacatgggtatgatcaccatccctgccaggcactacggcatagctactctctctgggggactgagagtactcgtagcaaactccgaacctatctagaagaggggggcgctctgcgacgcatgcggccgtgtccacagtgcgcgccagcgggagcccggcggcttagcccgcgtctggccccgccccctgcggctgggccctggggctagaggcgtccgccaatcggagagtggaggcggggcttagggcggggccgcgcttggcccactctgggcgccgggcgcta

SEQ ID NO: 52242 - DNA, 584 bp, Mus musculus
  source 1..584: mol_type = other DNA
aaactttatatgccccagtacagcatttgaaatgtaaataaagaaaatatctaataaaaaattgaaaaaaatttcatggcagcatgctagcagacatggtgctggagaagcagctgagagttctacatcttgatctgaatgcagctaaaagactgtctctcctgatcttctaaaaatattttattaatagcagtttgcttaaagcaaacacattttatgttgttaaagtcttcaatgttaatttaagtgctatattttaaaacaagacacatgtgtatagatagatagatagatagatagatagatagatagatagatagatagatagacagacagacagacagacagacagacagacagacagacagatagatagatagatagatagatagatagatagatagatagattggtaaagtatgaaagtataggaacctgtaattagaatttgggattcatgtccaatgccattttagagaggtgatatcacttgcatgggaggcctgtcttggaccagacatccaacaagactgttcagaactttggggttctagaacccctaagaattcttcctttgccaaggc

SEQ ID NO: 52243 - DNA, 571 bp, Mus musculus
  source 1..571: mol_type = other DNA
aagtcttcaatgttaatttaagtgctatattttaaaacaagacacatgtgtatagatagatagatagatagatagatagatagatagatagatagatagatagacagacagacagacagacagacagacagacagacagacagatagatagatagatagatagatagatagatagatagatagattggtaaagtatgaaagtataggaacctgtaattagaatttgggattcatgtccaatgccattttagagaggtgatatcacttgcatgggaggcctgtcttggaccagacatccaacaagactgttcagaactttggggttctagaacccctaagaattcttcctttgccaaggcagtcgatcacccttagaatcaggaatggcttcacgggattcaggaaggtcctgaaaactacttctctgtaagagcagagccttagctgtttgatcagcctagcaaggagaagccttcagcattgctgaacagtatgcttagggctctgccagcagactctgatacaatggatgatgcactgtggaagttccaataaaaccttacttggaaaa

SEQ ID NO: 52244 - DNA, 531 bp, Mus musculus
  source 1..531: mol_type = other DNA
tctaatagtggagctgtgccatcgaacaactaattcaatttttgccaaagcctcccgcagcaactgggagagctggtcctcttggcaggtcctggggagctctctggccacagattggggacacaagcccggggtggggtggattctcaccaccgctccgcccggttcctccatctccatcccgcgccccggggcccgagggtgggaggacggaattcaggctctttctgtttacggagagaaaaggaggttggcgtcggctgcgccaccccaatgctggttcaggcgcctagagtcagggttccgcagagccctggtcctcccgctgcctccagtccgccgtctgtcctcagaacgcccacacgcctgggtccggcaggctggccacccgctgcccaccggtttagggtgccctgatttcaggggcagggatgcccgggggttcccactctgaaacggagcgtgcctcccaccggtgaacactcgagtggcctgctgcacgcaggtacaaccgcggggcggtgtggactg

SEQ ID NO: 52245 - DNA, 383 bp, Mus musculus
  source 1..383: mol_type = other DNA
ttcttagctactctaattataacagtaaaagggtagaaacactgaggtctcaaaactgagaaaccacaggttcccagcacgcgtgtgcggaggctcacacgcacttttgggcattgcactcacaagtacaaaaagttcaattagtaaaacttacaaatgtagaaagttaggggaaatctaattaaattttgaattagtgaaagaatagtagcacttagcacttttaaaaagatatctaactagggatttaaaacgtgcctatttaggaacaaaactttggtagtctgacttgagactgacttcctcttaaatgtgaataaagcgtaacaagttaaacgctgtataatacttcaccagggttcagtgatgcgcatgctcataag

SEQ ID NO: 52246 - DNA, 389 bp, Mus musculus
  source 1..389: mol_type = other DNA
caaatgtatatgtggaactttttagtaggttcctttttagagaaccctgattaaaacagtgccctccaacactcattgagttgctattgaaacattgaaattggtccattgccctagtggatctgacagtgctttgagctctctgccctgatgttggaaatattccagggcctgccaaagaggatgggatagtagagctcccatggcacctaatcattaaaacttaatataagtgtatatatgttcctgtgtatatggacatttgcccagggttgaaaggatggacagccctgtgccagctgcgctgttcgtcccagcctggatccaggtgcagccttctcccttcagaagcctgctccctaaggagggaatgcgagtgtgctccgagc

SEQ ID NO: 52247 - DNA, 357 bp, Mus musculus
  source 1..357: mol_type = other DNA
aacacgagagttcacagctatggactatgatcctgtctgttgtgacactgtctttaaaggatgcaaggaaataaatgcttggcaaagatgctttgagtttgggatttttagataggcagctctaagcaaacctaggagctttcgagaaatgcaaatttctgtggtaatcagttgcaaaactccaccagtgcagctaggagtggcctagtcggtcacctcggcaaccagaccggagatcttcttatccctagaacttctggaagctctttcccggaagcttcccagggctgagaagcccgggagcagcggggcgcgtgcgcggggcgcgtccccgacccggcctgggcgggagcgcgc

SEQ ID NO: 52248 - DNA, 245 bp, Mus musculus
  source 1..245: mol_type = other DNA
gctgctgcagctggtggtcagcacacagctttgttctcagcctgagacttatttgagatttacatggaagttatgtaaacggcagggatgattgtgtttaaaaagtgcaagtggctatttaatcacagagctttacaaaatacttctgaaagtgccagcaactgagttgctctcagagtggctgctggccaggcctgttgcaacagctgatgctatttctgccccattagctgctatcaggccat

SEQ ID NO: 52249 - DNA, 291 bp, Mus musculus
  source 1..291: mol_type = other DNA
tatgtaaacggcagggatgattgtgtttaaaaagtgcaagtggctatttaatcacagagctttacaaaatacttctgaaagtgccagcaactgagttgctctcagagtggctgctggccaggcctgttgcaacagctgatgctatttctgccccattagctgctatcaggccatttacccagtaatggatgactctgccaagaccagactgggcaaggcagcctcctgggaacttcaaaaagaagactctttttattaatattttggtgttcgggatatagccatttccgg

SEQ ID NO: 52250 - DNA, 437 bp, Mus musculus
  source 1..437: mol_type = other DNA
atatacaacacagtttgaactgcttttttttaaatcaaaaggtttactattttcagtctgaagaagtagatttcaagccttcagattggacttaagacagctgagcttggaaagtttcacaggtcactacttgttaaatttaacaggtgacctgtaaaaggtttcgcgtggcctagccggacgtgggcaggcctggcataggcggggcggtgtctggccgggcgcgggcgggcgggaaccctttcgcccgccccaagtccgggcgagaacttgatttgcgcctaagcgcgccagcctgcgaagctcacaggcacgcggcagttggccgtatgcgcttgcgcgcaggtctaggcagggcggggcggggcggggcgtctcccgccgcgcgctggaggcggggcctaggccggagcgctgcgcccgcgggctgacctcgt

SEQ ID NO: 52251 - DNA, 372 bp, Mus musculus
  source 1..372: mol_type = other DNA
gtccctatttctgaaaacaggtatcataagtgtaaaatttagttattttgagacagggttccactctgtagcccaaactctccaccctgggatcctgcaggataggatagcaccgtccgggtaggctggggaaacccgcgcgtccagccaggtagctcgcgagcgacgcgtcccggctgtccacgtccccggcgcgcacgtgcgggtcgccgcaccaacagcaggagcgcgcgggtctccgcaaagtgcgcattctgcgtgggggatgagcgggtgtggcccatgccgccagctcaacctggcctaggaagccacgctctgcagcgtgcaacaaggttccggccgtagagcgagcgccgctaggtgttagga

SEQ ID NO: 52252 - DNA, 308 bp, Mus musculus
  source 1..308: mol_type = other DNA
tccaaaaaattaaaaatttacattaatgctttgtattcagtatattagacttgtatgttactcttttattaaataaaaagaattcagactgcactggcctttaatcccagcaggatgttaaaaagcaaattccttttgaaggtacactgtatgctacaagacacattagccagtgccttttaaagggccatgtattaggaaaacacacattatcatgccttgacctctgagtttaagactttgtacataaagattagtatctaatttattcttgtacttaaaacagtttacagattgcttctgaggtg

SEQ ID NO: 52253 - DNA, 648 bp, Mus musculus
  source 1..648: mol_type = other DNA
cccacggagccactgggtgcgaaaggggaattccttatatagccgcggccgcagcagcacagggctgtggccgcccatcaccacacgcaggtacccgggcgggggcatccctcggccgccgccgcagggactgtccagacaatagaggctgtccgcgctggagccgcgagcacacacttacgttgggagagcccacggggcacccaccgacacaagtcgcctgtggctttttttccctttaaaacaaaacaaacaaaacaaaagccgaggagtgtgtttccctggcacatccgcggaaatcaataccccgcgcagctgcaccgcgagccgcagccccgtgcgctcgtcgggccgcccgccccctcccccacccgccccactgcacacagccccgtgcccgcccggactcggctgcccgggcgtcccgacctgtctgtgctatttcccggcccgcaggcggcgagtccacgcacacacccgccccgtggcagcagctaggagccactagagcgtgcccggcccccgacgggcaccgcaggcgcggggttccagccccctgggcgccgactcacgccggccccgcgcgtccccatccccgcccgcccgcgagcgcgcggggcgcaactttcccgcgggcgcccgaccggg

SEQ ID NO: 52254 - DNA, 221 bp, Mus musculus
  source 1..221: mol_type = other DNA
tggattgactttggacaatggcacccgggtggcccacagtgattgcacacagcaggccctatggattcaaagtgcagtctgtgtactgctcgtccagcgctctgcgcgaggctcaggccaacaatagctccgcacagacctagttatggaccaggctgtagagctagggagaccgcaaggagcctgcggcctgccccacccccgcgccggcgcgcttcgac

SEQ ID NO: 52255 - DNA, 562 bp, Mus musculus
  source 1..562: mol_type = other DNA
aatgagagaaaaccatttgttcttaggaaaagatctagataaatgtatttatgctaaaatattaacacaataattatttctttgtattcaaaatgtgaaaaaaattcctgatataacaccttaagtactttgtaaatcaattttgggagttttactaatataaagtgtggtgtatggagcacacacccacaagtgtgcacatgtgcttattggggacagaagaattatggactaaaatcttttcttcccttccttgatctttgtgcaaatagttgaaacaaggtctttcaatgacttgatcctgttaggtaccaatcatgccaccagcatcaaagtatggcaattgttcaaaacaactgctcataattctgatattaagttcattaaaattcgttagatattttataacatacaaatttgaccaaattagttgaaacattccaaagtcactgtgggattaatatgcactgcatatggctgcacagtgtatatttcttggagtaactttcacgatgatgtatttttattaggaaagaggcagcattgttcacaatgagctcag

SEQ ID NO: 52256 - DNA, 287 bp, Mus musculus
  source 1..287: mol_type = other DNA
ttgatctgggcatcataaaaggcacaatcaacaagtggttaatgaatgagttctgattttcttgattttagagcctgaaggtttaagtcaacagtcaatggattgactttggacaatggcacccgggtggcccacagtgattgcacacagcaggccctatggattcaaagtgcagtctgtgtactgctcgtccagcgctctgcgcgaggctcaggccaacaatagctccgcacagacctagttatggaccaggctgtagagctagggagaccgcaaggagcctgcgg

SEQ ID NO: 52257 - DNA, 634 bp, Mus musculus
  source 1..634: mol_type = other DNA
attggtttaagacccctcttataaaatgattagtgtttttgcatagaccctacatacattcttttgtatgtaaatactctctagataactactaacgtactgagaccacataagtggatgttaaattatattgtgtagagactaaccagagacaaaccatatatgtttagtacaaatgaagtttgttttggtcgtttataaaaattagaatatttaaatgttttaatatagacttctggtttaccaaaaatcttattatacacagcttatctagcagttagtaccactattaattctagaagccattgcaaattatgacatctatgttataatttaggtgatttccagttccttgttttataatgtagcagagagataacactgaaaactacatatttacatgaaaatttattattgacaaaagcacactagaaataaaatgtaatatttctctaatcacattattgttcaactatttctctgatcaggctattagacagaatttgaggattcctagtccttagtatctaaggattcttagattttaaactagtatttatttttggctatttggaaagttgagagaaaattatcttaaacttgtaagtttgttttattatgtaatcttacttat

SEQ ID NO: 52258 - DNA, 524 bp, Mus musculus
  source 1..524: mol_type = other DNA
tgagaccattaatatgcttcatgttatggtgatccccaagcatgaaattattaactgtaattttgctactgttatgaatagtaatataaaaaaatctgatatgcgattcccaaagacatctggtgctgcaacaccattcctttggtgttgcagctaagtgaagtttcccatagaagtgggacctcagatttacctgtgatgtctgggcagctagaggagggaaactttttcattgcttgaaagaagctcgcagggcggggtgcattactgctgcaccccggccatgccccaaacaaaataaaacccaaggttgcatcagtaatctttcttttttttttctctaaggccaaaatgaaagcccctttttttttttttttagggatctggccttatacaaaattgaatctgaggaattctgcagcggccttggcgctactcagcagctgaggtggagccaggcaaagcctgcggcccggcgcgggcaaggattggctgctgggcatcgccccgcgcctgcgcagtgt

SEQ ID NO: 52259 - DNA, 515 bp, Mus musculus
  source 1..515: mol_type = other DNA
acatttttatgtttaatttttagactgtattttaaaaagtctgtttgcaacacacttaattgaaagtctgccaagttaggtgaaagaccttataaatatgtaaagcagttagtttaaattacaatcaagtaaatccctaatgattgatgttcttttcaaaacaattaaaagaaaaaaagaacgatttctaccacttcaaaaaaaaaactggacacctcagccattttgtttgtaaggcggcgctgtaccccccatacggacgccgtgaagctccccacgcgccgcgcgcaagggcgtgcccagatgctccgaggacgcggtcgctgctcactgtcacctactccccagcccggagaagggcccgggcgtctgcactctccagagcccctttccgagctgcgggaggcgggagcgagggcggagcccagaggccgccagccaatgggcgtgcgcgcccgccctctcgcccgccagcgcagagttgttaaccccgcgcctgccgccgccgcccgctc

SEQ ID NO: 52260 - DNA, 643 bp, Mus musculus
  source 1..643: mol_type = other DNA
tattagcagtcttatcaacatctatgtttttaataaagtaacgtttatttttataaagagtgtgaaactacgttgaaatagtttcttctaaatacaacagaaattcactgtatctgaactgtttcacttaagattgttacaatttgtggtaattattctgcttcaattatactgctgaatatatagatagtggtgactatctatatatttggagactgattacatccaaagtttgcactgcgctgcgctcgtcctgcgcggccgcccagtggtgacaagtgcccgcgcccgggacgcaggcccgagcatcccagccgctctacgcgccggccttcccagggcccgcgcgggcgccgagctcgtcgctccctcgcttgagcaccgcgcagggcgggaagcgaggcggccgggcggagcgggcgggcgaggccggcggccggcgggccgggggttggcgggacgcgcgctccatgccgcgccgcgccggcgcccgctcgagcccgcgctccccccgcgcgtgcccgcgtcgctgcgcgatgcagtgtgggtggagttttaatgtccgccatgttggccacgagtgagcgaggcgcggagcggcacagcctcccaccctcccggctggtgtcagggcccggacggc

SEQ ID NO: 52261 - DNA, 698 bp, Mus musculus
  source 1..698: mol_type = other DNA
tcagacttataacacgtttttaaaatcttgaacgtttgaaaatttgccgccaaacttttaaaatccatcctaacagtcttcccactttataaaatattttacagaaatgatatatttgggtacttattttcatgtataatacaagctaggtattagcagtcttatcaacatctatgtttttaataaagtaacgtttatttttataaagagtgtgaaactacgttgaaatagtttcttctaaatacaacagaaattcactgtatctgaactgtttcacttaagattgttacaatttgtggtaattattctgcttcaattatactgctgaatatatagatagtggtgactatctatatatttggagactgattacatccaaagtttgcactgcgctgcgctcgtcctgcgcggccgcccagtggtgacaagtgcccgcgcccgggacgcaggcccgagcatcccagccgctctacgcgccggccttcccagggcccgcgcgggcgccgagctcgtcgctccctcgcttgagcaccgcgcagggcgggaagcgaggcggccgggcggagcgggcgggcgaggccggcggccggcgggccgggggttggcgggacgcgcgctccatgccgcgccgcgccggcgcccgctcgagcccgcgctccccccgcgcgtgcccgcgtcgctgcgcgatgcagtgtggg

SEQ ID NO: 52262 - DNA, 508 bp, Mus musculus
  source 1..508: mol_type = other DNA
actttcttagcttccattaattggcaagttaaaagaaatactactggttataagtagtggttcacagaatccttgcaactgtaaatgagtcatttcactcacaaggtctttagaaagttgcttttttagtaagtacagaagtaacacaatttatagaatatatatatatatatatatatatatatatatatgtgtgtgtgtgtgtgtgtgtgtgtgtgtgtgtgtgtgcgcgcgcatatatgcatatatatatttatatattcatagagagagagtctaatagttgctcagtccaggcaaagggcaaaatttccttcttccatgtccttatataggtttccaacagaaatctattagaagtgggttttcccagtctcaagatccttacctcaagagtctggatttaaagtgtatcttctcaactaaagaaaaatctctcacaagtgtgtcctccacatttatgttttagttaattccagatgtagtcaagttgagcttttctctgaga

SEQ ID NO: 52263 - DNA, 618 bp, Mus musculus
  source 1..618: mol_type = other DNA
acaaggcatttaacaaattattattttttgttttgtttttgagatagggtctcactctgtagctatataaaggcttatgccagctaagaaattaactgattctaaattttatttatatgttttctttaactaaatgtctgtcacacatgacattagtcaatatgcatgtatttctcacagtagtgacaaagtcactcttattacagaaacagttgaagttgcaccaaagatttgcatgtactggatctacctgaagttccttttaagataaattaatatgtggattatattcttaagcctaactgctagttcacaactatccttgagcacttctcagtgtaaccaacaatttaaaaattgttgttaaagtgtacccaactttaaaattgtttctgatgtggggagacacttggactcggcagtgcgacaatgcagttacatggtcctgctaggctggagctagcgcctggaaggccgtaggaggatttacagcagctctgcccatctgcccctgcgcacaccaggagccacgcggctcaggcagacgcagagccacttcgggcggaaccagacgctctgtagcctcagctgcccaaacatcctgtaggggagggaggc

SEQ ID NO: 52264 - DNA, 475 bp, Mus musculus
  source 1..475: mol_type = other DNA
aaagtacaaatgatactaattctttcaggtatttttcgtgtttaagtcttctttagctcttaaaagacagagcaggaggcttgatgctccacctcagattacaaaggcacatgtatgcacacctgactgtggttgcacaggcacctgagctctctgcagtgcaagtggtgacctccacaagcctggactttgcaggccagcccagcgcaggagggaaacacctggggcgtctctgcgacctccttgccccgggctcccggcagctgtcctttgagcgcaaaaggaaagaaaaagctggttttgctgggcgctgctagggagcggtgccccgctgggaggatgagactgcctggggctcccgtcttggccgggcgctgtctaccagaggggttaacagcagctcccgccgcccgaccggcgcgatcgcttcctctctcgccgcccgggaacatggataccgcgtccgcgggatgtt

SEQ ID NO: 52265 - DNA, 320 bp, Mus musculus
  source 1..320: mol_type = other DNA
tccaagaggctaaaatgttttaccttctatagccagaatctagtcactacacataatttaaaataaaataaattttagaaaggtgtattttaatgaacaatggcaatactcattttacatgagttttacaacagttactttaagaatataaagctgcaagcctcaaatatcctaccgtgaaacatcacaggatattctaatgtgagccctagggctctgcaggctgctggaagaatcctggtgttttcaagatgcagggctctgggttctgagcagcagcgactagaggctggagtcactcagtgtttcctcccaggctg

SEQ ID NO: 52266 - DNA, 608 bp, Mus musculus
  source 1..608: mol_type = other DNA
aacatttatacatagtatacatatatcacatcaaagaagagaaactcacattgtcttcttttaattttttttccaaagatttatttatttagtacaaaattctttgtatcagggagttctgctataataattctgccgacatattattttatgtgctacacacatattcaagataatgaaggatgtaattattgtatttttctctattatagaagatcaagtccctttaatttttctatttttcctaaaacaaagtttatttattaaaaattatgaaagtaatgctttctctgttcctacacagacaagtagtaaataattcacttccagtctcaccaaaggtgaaaccatcgcagagcttttatctgacatctttctgcaatttgtgaggaatttaaaatatatcccagcagcctcactaaattaatatgaagttgaagatgggatgttattcaacaaaaggtccgtaccctgcacacagtgacctgggcctgggcagccaaggggagctctgctatgtttgcccttgccaactctgttgctcttggcccataggcccataggccccgccccgcccgaaaccccgcccccagagtctccgccccggg

SEQ ID NO: 52267 - DNA, 508 bp, Mus musculus
  source 1..508: mol_type = other DNA
aaaaaatcttttcagattaatgtactggaaagaatttccttccacggagaggagccgtaggaaggctccgtgcggccgggcacttacgtgccatggccaatgccacaggcgcgcggtcggcgctgctgggtggcagcaccagccgcggttctgggttctcccggcccgccgagtgtgacttccgtcgcggcccgccgaggctccgcgaccaccgtccgggccgcccaattaggggctttccgacccccgcacggagcccgaggggcgggggacacggccgcctcgcggagggcaccccgcccccgccgccgtagcgcctctgggcgcacgcgcagctcccgccgctccgcatttagtccgagatggcgggctcccaccctgcgcagcccggaggccccggggctcgcctcacgcaggctccggagcacgatcgcggggcgaggagccggcggcgttctcgagcctcgcggggcggggacggaaactgccgagctttcccgaaggcggc

SEQ ID NO: 52268 - DNA, 621 bp, Mus musculus
  source 1..621: mol_type = other DNA
gggctttccgacccccgcacggagcccgaggggcgggggacacggccgcctcgcggagggcaccccgcccccgccgccgtagcgcctctgggcgcacgcgcagctcccgccgctccgcatttagtccgagatggcgggctcccaccctgcgcagcccggaggccccggggctcgcctcacgcaggctccggagcacgatcgcggggcgaggagccggcggcgttctcgagcctcgcggggcggggacggaaactgccgagctttcccgaaggcggctgcgtccgagttgcccggggtggagcggcggcggctgtagcagcggcaggaggcggaggcgttcgctctccgcggggaccggaacacggcccccgtagttggcacctctgccccagccggccctaagcggtggtgacggagggagatggcccgggaccgccggcgccagtaacggggaggtgccgcgagccgccgagggtgcgctgagacctggtgccggggctgcccgccgcccgcccgccgcccgcgcgcccgcccgcctgcctcgcggccgctcttcgtttcgggccgggccgcggcggagggcgggcggacgggcgggcgggcgggcgtccttatcgggag

SEQ ID NO: 52269 - DNA, 458 bp, Mus musculus
  source 1..458: mol_type = other DNA
aaaagtacggacttccttaaggaaggctgagccttgagaacgcggatactaatattcatgagccggccgggggcgcagctcctgcggaggaggcggaccgactgtggccagaacgcggcgtggacttttgctgcggcctgactagaggagggcccggaactctggcagtggcggcgcggcctggaacggacatgaaccctccgggcccgaagaggggcctctaggtctgacccgagagtctagaggccagacacagccatcttgactgaggccttcgctgcgatcgggaggatgagcccgggggccaccactccgctccgggaggactgagtgcgactcagggggcgcgggagggggagggccggacgactccaactgttgctattctcctctgcagagaaaagtgggacacgacccgctcctgcagagccctcctgcgcgccgcctagagaaggagg

SEQ ID NO: 52270 - DNA, 391 bp, Mus musculus
  source 1..391: mol_type = other DNA
ctttgtagaaagggtaaaaattgaacttctttcacttcatatgtacataggtgctatgtagatacaaaggtagtcacctggatgtcagacattgtcttttctatcgccatgataaaacaccaaaagaaagtatttaattggagaagcagtagttgaagttcacattctgatctacaggtaaggcaaaggcttttgaatccagagacaccaagcttgggtatcagttatccttcaccaattaagtaaattaaattcagccagcagcaagctttttatcaattgatcatcttcaagctccaaaaacgtgggctaaaagtagctgcttctattatgtcccgaagtggctggctttcctgatggagacaagcaagcatgcttctgggccctgcag

SEQ ID NO: 52271 - DNA, 522 bp, Mus musculus
  source 1..522: mol_type = other DNA
agtggattctcctctaaacaaggccatcaaataaagtgtgggagttttatttcagaagcttatacatactcttataagaaaggagacaaaagttacctttaggtgaccttccttaaatgtttcccctataaattttcaggtggagttaaaaagggagatgtctcccttgtaaaagaagtgaattatactggacattacatgtcatacttgagaaactgccaggaaagtttactaaggttcaataggagacaaacttcctcaaaatttacacgtaagtagtgaacacatggacatttaatgttcttccttcttatttgaatttaataccaagtgtatagttgtccttttaattaatatggaaaaggagcagatgattttcaaataaatatacataggcactgcagatgcctatacagcactttcttgccagtaggtattaactgccagtaggcgcaggcgcataggggttggcgcaggcgcataggggttggcgcaggtgcaggcgcataggggctggcgcag

SEQ ID NO: 52272 - DNA, 474 bp, Mus musculus
  source 1..474: mol_type = other DNA
gcagtggatggattgattaaagatgggtgcagattgctaatgttaggtatcattttctgaagatcttcctgtcttcactgccctactgggattacaggcatgacttaaacctgtttatgcctgaatacccttcattatctggaacagattgtggtgtgagctcctaactcaagttggagctccttctaccaagaggctgcaacaagccccctccagtgtgcgcccccttgtggctgccggagttagacggcgcagacgatcagacagcgtgccggcgtgcttccagagcagccggtggggcggggccgcggggagggggcggggccgacgcggccaggcgtggggccgggctcgcgaaccccagccgcacgccacggttgtcgtgcaacgctgcggacgcgcggtccggtctgcgtatccgcgcgcactcgcgtgtccccggcgtgaaccggaaccgcttgcggaagtcgccgc

SEQ ID NO: 52273 - DNA, 317 bp, Mus musculus
  source 1..317: mol_type = other DNA
atgcagtggatggattgattaaagatgggtgcagattgctaatgttaggtatcattttctgaagatcttcctgtcttcactgccctactgggattacaggcatgacttaaacctgtttatgcctgaatacccttcattatctggaacagattgtggtgtgagctcctaactcaagttggagctccttctaccaagaggctgcaacaagccccctccagtgtgcgcccccttgtggctgccggagttagacggcgcagacgatcagacagcgtgccggcgtgcttccagagcagccggtggggcggggccgcggggag

SEQ ID NO: 52274 - DNA, 376 bp, Mus musculus
  source 1..376: mol_type = other DNA
aaaaagattttattgaacttgtgggttgcttacctacagctacaaggtctaagttggagttttttaataagctactgaatgactgaggagagttgttaggcaataactgttaaaggaacttaggaagtctctcatcaaggcctcctttgctattttggaaaaattaatcctaactttaaagttgaacctcgaggacctctatgcccccagagttttctgcgttctagaaacaagcctagcaagcagtgccttccgcgcatgcgagaggggttctacggatttctctagaatgcacgagggtgcggggcggcctcggagggccgggagggggaggggcgcaagggggagcggcgcctcccgcccggggtgagaggcg

SEQ ID NO: 52275 - DNA, 206 bp, Mus musculus
  source 1..206: mol_type = other DNA
tatagtcctgattaaggcttattataaatataaaggttgtgtgtgtcttttatctgggaattaaatggtcaaagtcttgcttcaaacagctggaacttggtatagtctgaatctttattgatttccaactatgttttgcatccacttaggaaatatttactgaaaatctttcaaggccccccgcacctccccgcggtggcttcttg

SEQ ID NO: 52276 - DNA, 330 bp, Mus musculus
  source 1..330: mol_type = other DNA
ttcagcttctcattagtcaaacttctctagagaaaagagaggccctcataggtcttcagtacagtataggaccagcctggcctacctagagcgttccacgttgggtaacaataaaataactatccggccacttcattcttttcttttttctctgtgtagccctggctatcctggaactcactctgtagaccaggctggcctcgaacgggctgtcagacaaacccgaaatctgtcacctctctggcgtgacgccgcagtgtcgctacttgccgtgcccagggcggagggagtccccgcaccggagatcttcaccggacgtcatcactgggc

SEQ ID NO: 52277 - DNA, 489 bp, Mus musculus
  source 1..489: mol_type = other DNA
tcacttctcaagtggttacaaatggagttttcttgttgaatatgataaattaaactgctaaccctcagtacaatgaagctgcttcggccatcaactgtgaaaattggttcctgtagcaaccgttaaaggcagggccagctggaagtggcggctctgcaggagcgtcttggagctccatcgaagaggtgcagaaatctgctccggcttggagctcacccggtctcatgcaaaaggccaagggctcttgaccgagtattgctcagaccatggaacttggtcactagatagagtgacaaagaagtcacacagtgacttgagagcactcccaagcgtgaaggctacatgtagggctccgcagcacgtgcgtgcttctgtacactctaaggttgaaggcaagggagcccaaaaggccaccagggcgctcagggcagcacctgaggaatccgcctctggccgcggtggcgcctcgctccgcccccgggaactgag

SEQ ID NO: 52278 - DNA, 453 bp, Mus musculus
  source 1..453: mol_type = other DNA
ctgttccagatgaatttgcaaattaccctttctattgcttttggcaagatagtcattttgactatattaatcctgccaatccatgagcatgggagatctttccatcttctgagatcagagacttgaagttcttaacagatctttcacttccttagttagagtcacacaaaggtattttatattatttgcaactaattttatagagtttatatccagctactgcactgaagctgttatatatactatcatatgatctgcaaatagtgatatttagacttcaagtactaaagtggacaaccttgtctagtattgtccaaagtgtatcttttagtaaaagaatagaacagaacttaatgaatcaatcaatgtgctgaagttagaattatgctggtaatattaattaaaagtaaaatagacctttagatcgtttaattcaaaaggaagaaaaagcaa

SEQ ID NO: 52279 - DNA, 439 bp, Mus musculus
  source 1..439: mol_type = other DNA
gaacgctgagttcccacgtaaacagattctgcgtggtgggcatcattatctcagtgataacaagcgccttcttttcttgtcagaattctccggaccagaggcggcgcctgccagcgaccagaagctgggactccgcccaggggccagcctgccaggccccgcccacgtacgtccccgacgcgacccggccagccccgccctggcgggcgcctgcgtgcgcgtgcgcgaggcccagctcgctcccttccgaacgcccgcgccgcgcatgcgcacagagcgccggcggtctccgtttgtgctcggaccgcggcccctcgcccactgcagcttggccgaggctagtcagtgccgggccgagtggaaccggggatgcagggctagaccacctctagcgcctctgagcggagcggggccggcccggggcccaggcggcggcggc

SEQ ID NO: 52280 - DNA, 562 bp, Mus musculus
  source 1..562: mol_type = other DNA
acttagtagaaccccaaagttttgtttaggttcttagctctaaaagagaatggatattggatcctgccccttttctttacattggcccctattaaagatcaaaggttaagattttaaaggggttttacaaatttgttacaattttgatttctgagttcgaggccagcctggtctacaagtgagttccaggacagccagggctatacagagaaaccctgtcttgtaaaaaaacaaaaaacagttttcatttatgtatccaactggcccccgcgtggacaagccgccaccaacagggggcgctgccccgtccccgtaaggcgtccacccgtggaggcgcgcacgcgaggcctcccaacgcgcctgcgctgagtgtggacgccagcttgccttccacccgacgcccagctgtcgcggccggagtggaaactgcgtgacgcgcggagagcgtggcggccattttcgtctcctgggcgcgtcagctgagcggcttggggcccgaagacaagcgccgcgcactcccatctgacgggagaggcgtcgccaccgccggaagttgtgccgc

SEQ ID NO: 52281 - DNA, 392 bp, Mus musculus
  source 1..392: mol_type = other DNA
gcataaataggaaaatgaaaactacttttggctctttctttacttagtagaaccccaaagttttgtttaggttcttagctctaaaagagaatggatattggatcctgccccttttctttacattggcccctattaaagatcaaaggttaagattttaaaggggttttacaaatttgttacaattttgatttctgagttcgaggccagcctggtctacaagtgagttccaggacagccagggctatacagagaaaccctgtcttgtaaaaaaacaaaaaacagttttcatttatgtatccaactggcccccgcgtggacaagccgccaccaacagggggcgctgccccgtccccgtaaggcgtccacccgtggaggcgcgcacgcgaggcctc

SEQ ID NO: 52282 - DNA, 591 bp, Mus musculus
  source 1..591: mol_type = other DNA
agatagagtttgtggcccaaacttggaccactccttgggaccagttcccatacatggggacaggggtgtttgttgacaaaatcacgttttgcttttagacacgatattctctctagagccataaataataaattatagaatcaaatgataataaactaatatcatccaaattctttcaaaattatttgcactatgtttgtaattagagacaaatgtatatgttgagtaactacatttaacagtgtggttattgcaaataaggtgttgaattttttgttttaactttaactgaaatatccacatacatttttttaagtcgaaggacttgctatatataaaatttatttaaaactctgtcctgagagtggtttttcaaccaaagatttgattggcttagcttaatgtcaagccaagtaaggacatcttgcaggaccgagttccctgcttccaacatgtgaatcccaagtattacttcctttaacatgtgaaagttccaggccttcacaagtagttttaataacttcgtaactggtcctcccgtcgctaggggccgctgtcgccctcccggtggccggaaggcagcgcagcttc

SEQ ID NO: 52283 - DNA, 577 bp, Mus musculus
  source 1..577: mol_type = other DNA
ttgtcatcatgggtcctctctgcaacactggggaagaaggcagagtctcctgtagcccaggctggtctcttaactactttcagtgaaagtagtgaactctgctactgtcatgaatcataatgtaaatatctgatatacaggatattggatatgccacccctgttattctggaggtgaacagttattctggagactaactccagttagcttcagtgaccaaggcaaagcctgtgagttaattaatcagccacatgattgaatcctattaccagttctagacctagttctcatttaatgctatttaaagggatgtttttttctttaaacaatctccccagagggacagaggatacctgcgggccctctgcaaactgcggcctcccgagctgggccgagtctactaaaaggtcaagtggcggcccgggaagggacactgggggtccatggtctccgggcggtccagtagggtgggacggaacgggacgggccacgcctcccgagccgccgttggctgaggcaaaagccgtgctccaccccgtaggcgcctcctcccggcgtctcccgtccccagcgctcc

SEQ ID NO: 52284 - DNA, 429 bp, Mus musculus
  source 1..429: mol_type = other DNA
taagattacctttttaaatgccttttcagtgtaagaaaatggagctattcatttaagataaagtaaaattcttgattttatctgtttggtttttgagacaaagtctcactatgtagcctaggctaccatatgcttgctgcatttcaataaaatgcaacctgagagctgagctcactgaagtacatagagaaattctgtttcaaacaaaatccctgacgatatggcattaaaagtaaaagtccagagtctgggagtgtcaatttaaatatgtcatagtaaatataatcataatatggagagggtgatggtttaaaatatttagagtcgagtcactccagggactcctccagacggaggaggagctttcagtcgccgagtgcctgaccgtgcgcatgcgcactccctcggcgtcccggggacgcttagcga

SEQ ID NO: 52285 - DNA, 462 bp, Mus musculus
  source 1..462: mol_type = other DNA
atcacatggtaggttttaatattcaaaattcagggattatagccatctatactcaaaacagcatagaatttagtcaagaaaatagatttttaaattttattttatttttaatctattttttaccctcaataaaatagatttttaagaaggttaatttctgaacttagggttagtatgccaacataaacaaaaagatatgtgtgatgtattaataaattaaaggacagagttactttctatatgtagctaacatgaccctttttcaacatctagtttaattacttaaaaacctggtttgcaggcatggtggcagactgctttaattccagatctctgtttgaggctagcctggtctaattgaaacacatgatgatttatcaaatgttggttttgaaaggctactgtgtgcatttaagaactaagtgtgaattttctgtttaacaactggtacactagtgtggg

SEQ ID NO: 52286 - DNA, 252 bp, Mus musculus
  source 1..252: mol_type = other DNA
gccctgcagcctgttgagctgctcggcgagtccaccccgggggcgcccagccgccgcaaagggagggactcgccccctcctgggtcaggacgtccccaaaggggaggggagggagaatgcccaaagggccctcccagcccctcaaatatatactaaattcctgggaggttttgtagagttcagaacaacataaacactgcggtgtccagctttctctggacttcaggtcaatcaaagataacggtaccttcc

SEQ ID NO: 52287 - DNA, 252 bp, Mus musculus
  source 1..252: mol_type = other DNA
ggaaggtaccgttatctttgattgacctgaagtccagagaaagctggacaccgcagtgtttatgttgttctgaactctacaaaacctcccaggaatttagtatatatttgaggggctgggagggccctttgggcattctccctcccctcccctttggggacgtcctgacccaggagggggcgagtccctccctttgcggcggctgggcgcccccggggtggactcgccgagcagctcaacaggctgcagggc

SEQ ID NO: 52288 - DNA, 237 bp, Mus musculus
  source 1..237: mol_type = other DNA
ggacaccgcagtgtttatgttgttctgaactctacaaaacctcccaggaatttagtatatatttgaggggctgggagggccctttgggcattctccctcccctcccctttggggacgtcctgacccaggagggggcgagtccctccctttgcggcggctgggcgcccccggggtggactcgccgagcagctcaacaggctgcagggcagagcagtaagaggcgcctcctctctcctt

SEQ ID NO: 52289 - DNA, 390 bp, Mus musculus
  source 1..390: mol_type = other DNA
catgtgcgttacatgtgtgttacatgtgcatgttcatctcgataaaacgatataaaataaaatctctagtttctggaacatactagatatcagtaattggtgttgaaatgttgaatatctaaagtaaaacgtttcttctagactctggaatgcaggcagatgtttggtcaacctggtaactactcttgcagggaatagtaaattcatttcagaatagataatctatgtagaggctttaattggcacagagcagaatacctactggcagaagcttctaacaaattattttgctggaggctacaacattctgagtaggttctggatctacagaagaaccagtttaactggcctgttatgccaacatattctggtttaaacttaggttatcca

SEQ ID NO: 52290 - DNA, 342 bp, Mus musculus
  source 1..342: mol_type = other DNA
ttctaggctggcctcaaattggccagtctgggacttttaaaatcgatcttctaaggaagtatcacagaaaattagtggactggtttaacatgagactttcaaattgtagtggtggctgccacacgtctatgattattatggtataataccagaaaacatcccaggcctgccacgaatagcgcggcagtcaaggacagtccggacttgttcccaacaggtggactatttcccgggaactccacgaaggctgccggagtccgccaggctcctcgggccctcgggaagccacccgccaactcgctcggccgcggcccggcggcccgggggaaaggggcgtggcgc

SEQ ID NO: 52291 - DNA, 407 bp, Mus musculus
  source 1..407: mol_type = other DNA
acagaaaattagtggactggtttaacatgagactttcaaattgtagtggtggctgccacacgtctatgattattatggtataataccagaaaacatcccaggcctgccacgaatagcgcggcagtcaaggacagtccggacttgttcccaacaggtggactatttcccgggaactccacgaaggctgccggagtccgccaggctcctcgggccctcgggaagccacccgccaactcgctcggccgcggcccggcggcccgggggaaaggggcgtggcgccgcgggaactccggcgtgacgtcacgagacggccgctgcctccggggccgggcggggcgagcagccctccggcctgcctccgggaggttctggccgtcccctccgtgggttccgccgccaggagaagg

SEQ ID NO: 52292 - DNA, 183 bp, Mus musculus
  source 1..183: mol_type = other DNA
tcatatgtgcacacacatgaggtttaatcagtactactgttcaggaagtgagcctctgtcaagcacagctctttactgtggcaggaagagctgaactgcttaatgctgggaaatcaacatctaggacccagcactctgtggagcactgtctgccagggcagagattcctttgctctggaaggt

SEQ ID NO: 52293 - DNA, 517 bp, Mus musculus
  source 1..517: mol_type = other DNA
gagaaggaaagtggctgggtagccccgcagttgctcttcctaaaggtcttcctagacccagagtcacggtgtccctaggcatcaatccccgtttatagaggaataaaagacttgcagacatttgagtgtaagattattctaacctgctcagatcttcacagaaaatccattacattttcagggcaaatgccgtctgtcctttgctaagagcaccagtggtgtcagccgccgtgtcacatcccagtgattagcaacactttcggtggggatgtccacatagcgtaactcttacccgagcacaagcttgggctgcggctcccgcggttctccgctcgaacgtacagaggtgacgtgctcgcctccagcacctggcttccgcgtgccccaggaatagctggaaccgtggggaccggcccggtgagcccccgccctgacacgcgcggtcgcctcccgccgctgcggtctccgcctgagcgctccggagcgcgagcgcggggcgcgcgcacttataaatacc

SEQ ID NO: 52294 - DNA, 364 bp, Mus musculus
  source 1..364: mol_type = other DNA
tgagtgcagacagttgtgtccagaagccttttctggcaatgaatttaaatattttggttgcatagatacagggtctcactgtgtagccctggctaacctgtggaccaggcaggccttggactcacagaatctgcctgcctcccttaaaaaggaaatattttgtgaagtcttttgaaatggtgagggcatcttaaaattccatccgtaacatttcatcctgtttgaagatttcgatctagaggaggcttccgtaaagatagctaggcagccagagaggactcgggtcctgctagcttggagccctcaagcgcgtggcccctttaaggaggcgggcgcccgggcgagtggccccctgattggctgg

SEQ ID NO: 52295 - DNA, 359 bp, Mus musculus
  source 1..359: mol_type = other DNA
tctgcaaccctccctgactgtcaggataggattgcagtgggtaagccactgcaatcacccagcagacagctgtcagaaatatctttctggtatgcaaactagaagcatcatactctgcttttaacaaccagctctgaggttgttgttcttgtgatttgatccgaacaacccttctcctcaacatcatttttgagattaaaccgatgtataatgcttatgcttttccagtcattatataaatttcccaataaaatagagaatcacccattttattgcgccgtcttatttttcgctcagtattaggccacatacggtgcctgcacagggagtgcccgctgagtacagccctcctgggttat

SEQ ID NO: 52296 - DNA, 456 bp, Mus musculus
  source 1..456: mol_type = other DNA
aggccagcctggtctacaaagtgagttccaggacagccaggtatttgcctatgtagacagccatctgagagccatctcgctgttcttctttaaataaaggcaccagtcacattagcctttgaagcttcaagcacattctgagatattgggggttaaaatgtcaattgccggtatgggcagatgctcaaaatcagtttctggggctagatacggaatttgaacacagaaatcagagtcagcgtcctgactcatctctctgactaatcggacagaggaagggaccctgggtgtcgacaaatatgtcaccattggtaagcaagttagaaaccaggctggcctcccagcagctggcaggcttctgggtcacgtgactcgccctcccctcctgaaaggggcgtgtcttctggtgggaccctcccccgcccactgatgcgcggacggccgggtcacgtggag

SEQ ID NO: 52297 - DNA, 353 bp, Mus musculus
  source 1..353: mol_type = other DNA
tttctgatggtggaattataagtaatttttaaaaaattaagtgattttttaaaaattcttgctaaatttttgtgtattttctattcataaacatctctgttagcagtaaacggccaccacactgtgttgtcacagcacagcagggtcaggccatcgctgcctgggtgccccaattaggagcaaccaccatcccacttcccgggaaggtcgcctgcctgcgtgacccctgcccggggtgaggtgcatctgcacgctcggcaaagggcttggcccagcaatgcgctctaagccgttagccccgcctccggggagggcccgagaggcagcagcgctgacaccgcctccgtccttcc

SEQ ID NO: 52298 - DNA, 269 bp, Mus musculus
  source 1..269: mol_type = other DNA
gaactctagaaagtctttaatttatttctcagactccagaactctgcatggagaatcacatttgtgaaatgacattgttgccatgtgtacaagttgtgttaacatgtgtacaagttgtgctctgggagtgcacgcggagctctgggcccgcggggtgaggcgtgtcagcgcgggcaggcagggggccagtgcgcgcgccagcctggccgcccctgcgcgtgcccgggcgccgccctgtctgtcagcggccgagggaacgcgcggggccg

SEQ ID NO: 52299 - DNA, 361 bp, Mus musculus
  source 1..361: mol_type = other DNA
atagggtttcagccgttggggggaggttcagggatattcacaccacagcacctaaggcttcaagagggcctaactcaatgttggaggatgtccaagcctcagccttaaaccagcaagatccagactctgtacgtagctgtcagtttccttcaagcttctcctggctcttagaacagtcagaggaactcccctggtcttctggattttttgcagccagcaatgtccacgcctgacatttcctgatcccgagggtgccagcaacagcggcaggttctcaacccggggccacgcccacgcggcgggctcatcgcgtggacagaggggagcggcccagggcgccgcccactcccggggctgtcca

SEQ ID NO: 52300 - DNA, 372 bp, Mus musculus
  source 1..372: mol_type = other DNA
gctgctctccagcagtgcggcagtgttgggcccaaagacctcacagtgttttgccatcctggattcagaagcacctcttagcaggtctgagctgtttaaagtgcaaaataaaactattttctatctttcttttacacagtgggaactcctttggtgagttagttcataggttatgccttccatctcttttctaactgacttaaaatataaaatagatagcctgctctaattgtctggcgctgtctaccaggtgagtagaaggtgacgtctaccccacctcccaggaattacagaaggctgcacttacctaaggtggggcccctgccgcagacagccttctttccctgagtcaggcaggcccgggcactgcag

SEQ ID NO: 52301 - DNA, 432 bp, Mus musculus
  source 1..432: mol_type = other DNA
ttctgtgtcagataacaaagctaacatttgtgtttaaattttgtacttagctcactatctatttaaagtgaatgagctctttggcagggaatatcataatcttagttgtaacagtattgtttatttttaaaacccataaaccgattttttttgtgtgtgtctaaatggtgcacgcagaaaccagactctaactctgattaaatcatcacccttggtgttttgctgacatttgcttatataaaaaccacagcttaacacaccttaacagcttacttcttagcttttaaacatttagctgggccctagcaagcggtccaggttctggaggccacgcccctgccgcccaacactcctaagggttctgacacgcgtggcccaagccaagccacctgggtgtcccgcgctccgtcgcagcaaaccaggagttctctg

SEQ ID NO: 52302 - DNA, 633 bp, Mus musculus
  source 1..633: mol_type = other DNA
cataatcttagttgtaacagtattgtttatttttaaaacccataaaccgattttttttgtgtgtgtctaaatggtgcacgcagaaaccagactctaactctgattaaatcatcacccttggtgttttgctgacatttgcttatataaaaaccacagcttaacacaccttaacagcttacttcttagcttttaaacatttagctgggccctagcaagcggtccaggttctggaggccacgcccctgccgcccaacactcctaagggttctgacacgcgtggcccaagccaagccacctgggtgtcccgcgctccgtcgcagcaaaccaggagttctctgggggcctcccgtgggtgtcctcagcctgggcgctagcctgggggcctctggggccggttccggggcctggaggggctgcaggaagccgcctggatcgaagcgggcgcagacacccgaaacggctggggtggccgcgagccggctgctgagtaatcccgggcggcgggtgggggcggccgggcgcccacgttccccgcgccgcagcccggcggcggctccgccttcgcgtccatccccgccccctgccggctgctgtgctctgctccccgcaggtcggagccgggctccgggagcg

SEQ ID NO: 52303 - DNA, 199 bp, Mus musculus
  source 1..199: mol_type = other DNA
tctgcagaatcttcagcacagatctttcgagcccagcaagtcctggctggccctaggcagtacctctattctttgcaatgtcaagatggccaacttgtaaatgtagttaagacaggctgactgaaattcatcatgtcctactgagtccagagctctgctggagcagcagctagacaaaaagctcggatctctggctcat

SEQ ID NO: 52304 - DNA, 468 bp, Mus musculus
  source 1..468: mol_type = other DNA
atgcattgagctaagtgctagcatgtagtagaggacaaaaacctaagctacttgctgctgggctacatgcgtagcaggtgggagttctgtactaacacgcacccagaccgtctttgaattttgagctgaaactgggtcccaggttcctacttgcaagccaggagattgttaacatacttacttaggtaattcagagccttgtctcaccttttgcaaagtatcctgaggatgcttggagaatcatcttcttggtccccagcaagcagaaggctccattctgagttcctaggcaactagaaatgtccttagaacaactgcctcacaactgatgtatggacattaagtgcaaaactggaaatattcctttatatacaaagttttaaaattgaaccttttttgggtatgctaaatctaagtatatataatcagtttaactgtaactttatataagtgtccatctgtcacata

SEQ ID NO: 52305 - DNA, 368 bp, Mus musculus
  source 1..368: mol_type = other DNA
cgtggaaagttatgaagttatagattagttttcaagaacttcatggatggtaaaaatgacccacataatatttttgcttggtctttttgccctctacaaaatggaggactataagtcagttattccataataaaattaagtgtattacaataggatagtttataaaagcacatttaaaataggatatacaaactgatgagttctcagtactctggagagagtcctgcaggatccagatgtgcttaaagagttttaaacctaggcggggttaatgccacccaaagaagagtcaagtttgtgacttgtaaggtggagtcatagctgactcccagcttctggtataaattagaaaagcttgggaatcacca

SEQ ID NO: 52306 - DNA, 223 bp, Mus musculus
  source 1..223: mol_type = other DNA
attacagatgtgtgcactaaacctgtcaagagaacacttccaaagtatcagaagagttatttcaaaagcagttttgtctaaaattgaattctccaattcatagagtaccactgaagttgagagagccctttaaaggcgcagaaaaccccagctttgggagctccacttccaaatctgaaacccggggtcacgtgaagtgatcagtgcagggcccctcccccat

SEQ ID NO: 52307 - DNA, 331 bp, Mus musculus
  source 1..331: mol_type = other DNA
aaaaccccagctttgggagctccacttccaaatctgaaacccggggtcacgtgaagtgatcagtgcagggcccctcccccataaaacaaggtccctttgcctgaaggagaaattttgtttagaattttcaaagacactgaaacttttccagacatggattccagggacttgttaaataaacaccagttttgtttatcacagcccttgttccagtatcatgactgcagtcctgctctacccttcaaggctggtcagaatgggaagtaagtacgaacactcgctctgctttagggatagtgagcccttctgcagcagccagactgcaagcaca

SEQ ID NO: 52308 - DNA, 298 bp, Mus musculus
  source 1..298: mol_type = other DNA
tccaagaaacaaagtttgttgctgctgaatgcaagatctatcaacagcagtcaacaatttatatatcctgcatgatgttggaagtctacattggactttcaacattgtagaaattgttttagaccatgagacttttgaagttgtaataaatgtattgaacatgtagaactttggttgtggtgtttcttcacagcagtaaaacccaaactaagacactctgagtctctttttatgttacagagtttcaataatgcaaccatagtgatgcatttcttggccagtactttcattgaaaact

SEQ ID NO: 52309 - DNA, 527 bp, Mus musculus
  source 1..527: mol_type = other DNA
tgccaattaagtttacatgagtgtagtagcaaccaaagtaaaaattaaatatatagctttggacttcagggtaatgtatctgtttaatacggactcctcatccgagaaaggagggagaggctccgccccacggcggaggcggacagttagtccccgcgagcgagtcacgtgctgagctcggcgccaacatttctggcgcgcgcgtcggatccttgggttccgcctggttccctttcgggatacccggggcgtcctcgtgagagcggcccgcgtgggtgacggccgctcagtgggcgcggccgggcctgtggtggaggccgcctcaggagccgggcccgcgagcacgcaggtcagtgtggctcagggtggggcgtgaagggccccggagccccgggatctctgctgtggagcctgggtagcgggcactacgctctgcgcaattgattgacaatggaagtcacgcgtcgtgcgtgagaccctatggccctcataagtaggctgcattgtgaaactgaattgctcagcgt

SEQ ID NO: 52310 - DNA, 613 bp, Mus musculus
  source 1..613: mol_type = other DNA
tataactgcagaaattatcctagattttgcaattgagacattgcattagttaagtgcctgttttattaaacacctgtcatacgtggcaggcacatgagatgtgtcacactctaatgactctagtgagcaacttgcctgtaactggttctcggtacaagtttctagaactgagcagacttcaagaactacagccttttcaaaagttaaaaatgacgcttgttaatttttcatcacaattatgtttgttaaatccctttgcaaacttttgaaagttgaaatgttaacaagcttgtaatttcctgttctgctatgtacaaatcctttttaagaatgcatttatatgtagactgtgtggctagactggccagacacactagtgtgaagggaaatttgtaaaatcttatttccatgtaacatctgccaattaagtttacatgagtgtagtagcaaccaaagtaaaaattaaatatatagctttggacttcagggtaatgtatctgtttaatacggactcctcatccgagaaaggagggagaggctccgccccacggcggaggcggacagttagtccccgcgagcgagtcacgtgctgagctcggcgccaacatttctg

SEQ ID NO: 52311 - DNA, 505 bp, Mus musculus
  source 1..505: mol_type = other DNA
ttatgctctaagatcaacagttccacctcttaaaggatgtgctggacttttgtacagtaagagttctgtagataacgttcaattaatagctgcagtgcacacttccttacagctttgaatgtttataagacatggaaggaggcaaacacatttttgtgaacaaaggaattgtctggactgaatgctactttagaacagaattcataaccaatactgtaaaaagcagcattaaatttggaatgatcctatctaattcaaattttttgcataacggatcaatgagcccagtctacactaattgtaataatcagtgtgagaaaattgtgcccaaacacaacattgtatcactggactgtagtgaaaaacataagtcaggatgagtatgagagtcccaatttggtaatccaaactctcccatggcttctaatggcattggagcctcagtgtcagaaagcctgtagctggcagccgctgcctgcacgcagggtcagtgcatcgcagttgc

SEQ ID NO: 52312 - DNA, 470 bp, Mus musculus
  source 1..470: mol_type = other DNA
ggattaaaaatttattgtgcccaaagcatctttataatttggcattatgatctgagaaatatttaatagctttgcagaaagtaatataagaaattatatctaagaaagagctactcgtaattatgtctctttcttcactgaacagtaacacttgtaaccagctaacgagctccctgtacattactcttgactaatggaagtatgagtcattattatgccagtaataacatccttatatacgtgaaccacatgctttaggaagtacatgtattcttggtatttgcccaaatactcagtttagaatgattcaagtacttgagcaagtacatgtaggtatagacattcaggcagtctccacattcgagtaacagtttaaccaaattgttactgccatttagggaaaacacaaatgtttctttcagagtagatgacacagcttcaactctctactagatttcatttctggtagg

SEQ ID NO: 52313 - DNA, 405 bp, Mus musculus
  source 1..405: mol_type = other DNA
gtttaaaaactattttcttatccagattcttaaataccgttatgtaaagtactgaaccagggaaagaaaattttagttggaagtcctttctgagaaaataaactgtttccactttttgtatccattctaccagaagggggaccttcctcggctttaagcagcttctaataacattaggcggcggcgcgggtgtgtgcgcgagccgtcggcgcgcgggcgggagggcaggcgggcgcgaggggcggcggcaggagcgggcggggcgcgcgcaccggcgggcgggggcgcgcgggggtggcagcgccggagcgggcgggggcgcgcggccgggctctgcggccggcgaggctccggatcccgcgcggcgcgtccggcgcctccagtccgggtcttggcgggaccccc

SEQ ID NO: 52314 - DNA, 661 bp, Mus musculus
  source 1..661: mol_type = other DNA
tgtgtgctgagattaaaggcgagcacccctgaggcactaatttttgagcatcagtgatgttaagtaacgattcacataaacttctcttttgtgcgactaggaagtctatgttgcagaattaatccacagcaacgtgttcctttttgaagcctgggcctaattaagcactaagtactccgagtctaggctagactagacgagcgtgcactccgaggtgcgcacgtggagcgcacgctccggagccccgactgtccctctgggcggccgcccgggcgagcctcttccccagagggtcgagggcacagttggggggtggcgggcgggccccgcgtttcctgtgacagcgcggcccagccgctccctcccgccgtggcgggaccatttcctgagcgtccgggcagaggcggccggcgcggcgctaccatcagcgcagggacgcgggggtgcggccggtgagcgcgtgagggcagcggggcggaccgcggcgggaccgggggctcgagccgcaccggcagcagtgagcgtcttacactccttgctgggagctgcggctcagcgttaaggccaagccggccagcgagggacgcggcccgggagcatcctccccccaccgcgcgccctaaggtggaactgcccggaggcgggcgtcgggcccccagct

SEQ ID NO: 52315 - DNA, 528 bp, Mus musculus
  source 1..528: mol_type = other DNA
gcaatcaactaaaatctagaattttgaatagaaagaaatgagtttctttgttctctctgatatctaataaaaaatacatggcaagtaataatagctaactgcagatttttaaatatggacaaagacttctttcataggtagtaatgttgcaccaggttatatataactcttgctacaactcaacttcagacatgtttcaatcatatctttggactcttacttctttaactaaaacagtattatattgatagaaactgtaacattggtaaaattgtaatttctttgcaaacctggacaatttagcaagactgtttaaatttcttttttcttcaattaactgtttaaatttctaaaggaagtctactaccaaaaaaaagttcacttttttttgttttgttttgttttatttgttttgtttacaaaataggacgatcattgaaacgcatatatatataaaatctttcctatccaaagtctggaactccaggacttccggaggcggttgggcgcacagggcgttcaggaata

SEQ ID NO: 52316 - DNA, 497 bp, Mus musculus
  source 1..497: mol_type = other DNA
aaaagattttagagctggagtttgaagattaagaatcaaaagacctgtcctagttttccggaagataacgtgtaaacaggttaacaatttaaatatgctcctagtgagaccctgtgaataaaaaaatttccagtttgttttagctatttaaagtctaaaataatactttaggaactgtaaacgtatacactattctgattaaatttttgccaggctttccagggacgccggaaaaaaaacttttttcttaatgtataacatcctagggcaaggcaaggcgcgccctgtcgcaggtcgcccggtgctgctagccgctcgcttccgggaacctgcgcctctgagcttcagattctgctgaagactcggagctactccggagccgcccagcgtgacgtcactagcgcgattcctctcgctggccaatcaacttcagggaagccccgggcggcgggggctgccagggcgcgtgcgcaagggctccgcgtggctatataaac

SEQ ID NO: 52317 - DNA, 608 bp, Mus musculus
  source 1..608: mol_type = other DNA
cggcggccctagtgggtggcaagtgggtccctggggtcccgctggctagaccggcgcggacttgccccaaacctttggggagcgccccaggtctttgtcgggatggaagctgggagccgcgctgctggccccaggcccccgcgcctcgccgccagcaagtaggtgggggagccgctgctgccgccagccccatctcgctcccaagcctcgcccgctgcgccctggccgcgggcgcacagagggtgcagggcctcccagagcctcctccacccagctcattaacctgcctgctccgggcggtcccggacaccggctcctcgcagcagcacccgcggccggctcactgcagcagcctcccggatcccccggctccggggggcaatgagggggaggtggagggggcaccgctcctctggcatccctcccgccggccctccctcccgcccgccggggcccgcgggcccgctccgccagagggtaagaaggaagaaggtccagctagcctccctctttcccctcgcccctcccgagaggcgcttcggaatgacaattggagcgcggctcctttaagagcccggcctcagcgctgcggtccaatatagcgcatg

SEQ ID NO: 52318 - DNA, 398 bp, Mus musculus
  source 1..398: mol_type = other DNA
tcatggagtccttccatcaaataatgggttgatcaaataaacctaaatggtaggtgtgttaggttttgttttgttttaattttcctactataaaaaaatgtagtgtaactctttcaatctttctacaattctgcatggttgaacatttgaaatcaatgattcagctagattggggcaaagtagactgcatgtgctttttttttgcgacatttatgtccccaaaggaaccaaaaccatgctgttctattgccaatgatcgacagggcggtgagcctcatcaacaagttgtgggaccttcctgtaacaatccttataattatcatcatctgctgcctgtttttcaatctaggaaaaaaaatcgtatatgtttattactctatagggggtttcaaagccct

SEQ ID NO: 52319 - DNA, 585 bp, Mus musculus
  source 1..585: mol_type = other DNA
aaaagtatatcacagttttagttgctgagcagtgaattcctgatactcattatattgattagaattcattgattaattattaagacacaatcataaaccaggggctaagattactcctttgctatgtacctacggtctatctaaggaaaaaaatctccttgtggggacagtttcatgggcatgcactcatgcatttggaggagtcctgagtaacttatgaggactgtgtcctacactcattcttaacagaaagtatatatacagtttttaaaaattgctgcttcatagtaaaaaaattatagtcatcatcatcattattattgttgaactcaaagagtagaatggagttacagctatatattataattaatttctaagctcacatatttcaaatattgaaagtcaatgactagctcacaaccattttctaatggttggtcagtggtgattggaataatccaaattaaagaaatacattctcaagtgctttgcatttctgaaatgccctgtgtgacaatttctagttcaaatataacttactgattgccatggtcccgtaatctgactcccagtgtactggagccc

SEQ ID NO: 52320 - DNA, 330 bp, Mus musculus
  source 1..330: mol_type = other DNA
acagtatcattaaatatttgcatatatgtcaaaattattttaaaacttgggacttgtgtgttttatataaatatttctcagttgaaaaggagttataggaaaaagtttggattaaagattggtgttacctcaattggttatccaatacctatacagactgaacagttattaagtatagtgtaatctcaatgtgatggagccattatgctactatgacccaatgacaatttaaccgtgagttatccctgggatttcccatttaacacttgaccttcagtaactgagactgaggaaagtcctgagaggagggcctctgtgtctctgaaccaa

SEQ ID NO: 52321 - DNA, 495 bp, Mus musculus
  source 1..495: mol_type = other DNA
gtaacagtgtttcttctgtgtacctaaacccagattagcgactttcactctttaatgctttaaaagaaagtttgctggtttttttttctgcaaactaagcaaacatgggttcacttgattttttttttttttggtcaagataattgctatcataatatttggagctaatttttaaacctcagtatgctttaattttaatgatttgtttttaaattctcctgcttgtccgaatttgacaggcatggccggagaactactgggtctcagttattcccagtgtagaagaggatttctgaagtctttgcagtccaaggtttcagagacttgtcctgaaggactgattgtgggtcagtccgcttctgtcgctggtgaggctgttgtcacttaagccacacccagactcagaatcaggggactctgagtggcggcggcgggagcaggcgggctcataggcggcgccgcagccctagccggtccggctcagcggtctgcggg

SEQ ID NO: 52322 - DNA, 610 bp, Mus musculus
  source 1..610: mol_type = other DNA
agggcgggggcgggtggctgccgcggatccggcccgctacctccgcagctcggtggcctcccattggccgcgacgcgggcgggagggggcggcggcggcggcgggaggggacccggaggcccgggcggcgcgtgcggccaggcgggagagcggctgcagctcgcccgggtcgcgccagtggagaaccttcgcggtgcgcgcgagcgacgaggagcaggcggccggggccgacgcgcgcaggcggcgaggggcacggccaccgcagctctcccccccccccctcacgcggccgcagccggaaagccgcggaggcctggccagcaggaccgtcgccctttgtgggcgcaacgcgcacggcctcgagcacccttcccccgaggcgctctctttgtcgcaccgctcggccccggcgaggacgcccagggtggggcggggggagggtgctgctgagagcgccacccgcccagccgccacctggggctgcctccgcactcccggccggagctcagcctcctgtgctgcggcccgcacacacgcgagtccggcggactccgaggcccgctatttgttaccagctcgctctcattggcgggggaaggggtggccactg

SEQ ID NO: 52323 - DNA, 381 bp, Mus musculus
  source 1..381: mol_type = other DNA
ctgtattatttattatcttgaaaaaaatcaagagaaacttgtaaagttttacacttccaagttcctgtttcaagttctctcaaattcccacagtacatcgcctggcctgagctcccctgccgtgctgtgtctggcagtgccaggaccccgcggcggacctaacatagggccagggcccgcagccctccacctgctgggcggcgctcggcggagcccagccgcccctccagcgacccccgtgggctgcagcagaacagggcgggggcgggtggctgccgcggatccggcccgctacctccgcagctcggtggcctcccattggccgcgacgcgggcgggagggggcggcggcggcggcgggaggggacccggaggcccgggc

SEQ ID NO: 52324 - DNA, 310 bp, Mus musculus
  source 1..310: mol_type = other DNA
tgaagcacatattcttctttggggcaaactgggcaaggcagacatggggagtttgactgtgccatggaccccatggaactactgggtgggctttggactgtggcaagccacaggatcccactctgggtctgggtttctgggccacatggaggccagggacaacgggacccttgggtggcccagggaaggaaacagtctggctagctcaggcaagctagttaggtgggctgcttgtgtatagccctggctgtcctggcaactggctgttgccaggtaactgtggggcatacctagctgttgccaggtaact

SEQ ID NO: 52325 - DNA, 373 bp, Mus musculus
  source 1..373: mol_type = other DNA
agtcactttgcacaaaaactgggtctgtgtgaattaaatgtctcatctgaaattttattatcttagtacaatcacattgaaaagaaaaaaaatgaccaaatattgtgagtaattaaagcacaaagtgtttttttttttttttcttttctctgattttaatatctggctcagtggtttatttaaaaatgttaatgaggttggatgggaggatcctatgatcagatcaggtgttcctggcactggggatgctcagcacagtatcccgggaccgctttcctgggagtgagctccctggcggccgcggggagctcagggcaggctcaggcatctccaaggcggccctggagtaggaggggccacccagcgtctcctt

SEQ ID NO: 52326 - DNA, 292 bp, Mus musculus
  source 1..292: mol_type = other DNA
ccatgaattctagtcctgataacagcacaggacatttagtcaatcggaggccatagatccattgtcactgtcaatctattttggagttaacccccaggtaactccaccggcagtgggcagtgctctgggcggggccagggtcggcagggccagctgttaaacggttgaattcttaaagtcatgaagactcaagattcgagtcttttggacttgcccagagctccaccctcggacagaggaagcccctggggacaagcgcgagaaaagcgcctgtgtgcgcgctccacctctg

SEQ ID NO: 52327 - DNA, 251 bp, Mus musculus
  source 1..251: mol_type = other DNA
acattttgataattgaaatggttttgagtgccagaaggcacagtgagtgctttctgaagagtgtgaagctctccttcaataacctttagtgccatgaattctagtcctgataacagcacaggacatttagtcaatcggaggccatagatccattgtcactgtcaatctattttggagttaacccccaggtaactccaccggcagtgggcagtgctctgggcggggccagggtcggcagggccagctgttaa

SEQ ID NO: 52328 - DNA, 230 bp, Mus musculus
  source 1..230: mol_type = other DNA
ctatgcctctatataaaatatgaatttagttccaccactgcaagaatcgttgatgtttacaaagagaactataagtgaactatgtccttgttactttatactgactcgcaaagctgtagtgctccatggcttaggctatacctgaaagctttgatgattaactacagatggaagtgattgcacaagctttgcacaattcctgtttgcacccgggggctgggcatggggtg

SEQ ID NO: 52329 - DNA, 364 bp, Mus musculus
  source 1..364: mol_type = other DNA
gagatttcatgaattcattgtttttaatagctgtgtagtactccattgtatatatgtattttaaaggacatgccattaaagctttttaaaacctgtcactcatcattagtaacttttcactttggaagctaacatctattaaaatgaaaagtttataattttctactgtgaaggagctgagaccttccgaacagctgagaagccttctgtctgttaccaaaagtcttcagtagaggagaggcaagtgcctcccccacagagagcatcttttcatcgggcagagtgtctctttaactggaagcaatgatgaacttgtcaagcatttcactgatattcctcccagtcttctggaaaattaattgaa

SEQ ID NO: 52330 - DNA, 387 bp, Mus musculus
  source 1..387: mol_type = other DNA
gagtctttgactgtgtgctcagaaaccttggtaaaattttcaagttagttttaatgcattttaaaggacaggcccttaaagaaacaaatgatcataaaggttatgtcttgtttgctcaaaatgctttttaaaactcctctcatcattagtaattttttatgttaataactttggaactagctgcatcttcctaacatctattaaaatgaaaagcttctaattttctactatactccaaatacacttgtcttacctggtgaggagctgagaacttctgaacagctgagaagcctttcagcacacagagcagcttttcagctggcagaagggtgggagcaatgatgatcttgtcaagcatttctccttctcccagtggaaggcacatct

SEQ ID NO: 52331 - DNA, 392 bp, Mus musculus
  source 1..392: mol_type = other DNA
gaagatattccaacagagtctttgactgttgctgtgtagtgctcagaaacactaatgtttaaccacctcacctgaagtgagtcttctgaattctcattagtggtaaaattttcaagtctgttttaatgcattttaaaggacaggcccttaaagatcaagaaacaaatgatcataaaggttatgtcttgtttgttcaaaatgctttttaaaactcctctcatcattagtaatttttttgtcttattaaatttagaactataaaatgaaaagcttataatttcgctccaaatatacttctcttattaatctgatgaggagctgagaacttctgaacagctgagaagcctttcagcacatatgcttcagccctatgatgatcttgtcaagcattt

SEQ ID NO: 52332 - DNA, 378 bp, Mus musculus
  source 1..378: mol_type = other DNA
caaaaacgaccatcaaaattatctagatactattttggtttttgttttaatctaatttctacattcagcttattaataaatatgtatgaagatttaaaacacacaccctcattcttgaaattgtcaccaatttctcatacaaattccatgtatcatagaggtttgctttctgaaaggaacacgccagtaccggtcatctttaaaattgaaattgcttttcaaccaatgaagagactttttagccttctagagtaatttattattcattttctttggtgtccaacaaagggtttcattgcaataagaatcaaggtgtggctaagttcatgccagccttccaggccagcccaggagcttggggtggaggaatatcttcat

SEQ ID NO: 52333 - DNA, 468 bp, Mus musculus
  source 1..468: mol_type = other DNA
gtatatttcaccaatatttaaaaagaaacagggacaagatatttcctaccagatttttttatcctctggactatataacattttctgctaagtactctagaattaaatgaactcttgggaactaaaatgcttctaacttctaaaaacaaaattgttctgaaaatccttctttggatattgtgaacacggggtatagcctagcatgcagcagtgtgcaggctgattaaaagagcactgtgataacctatctcacagtcaatctactttctctaaattataatcgaactaattcagtaatgtacattattaattaagacaaaacaagtgtctttttcacaagtagattagttttcagctgtgaccttaagaagccaactagatcagtgctgctccaacaaaggattccattgctgtaggaactgaggtgtgtctcagtttttacctgggaggtgagaccaatccttggct

SEQ ID NO: 52334 - DNA, 384 bp, Mus musculus
  source 1..384: mol_type = other DNA
gtggcttgaatgtgttcattccaaatatacttgtgcagataactagtacgaatacattcatatatgttaaattttacctgttttccataacactccagagtctggacacccacattcagtgtaggtcagcctgggttaccattcaatttaacctttactcactcgtgcaaaaatattgttttaatatcaacaactattgcagaattcatatagattttctaatttacgtctctaacctctgatctctgacagatcaaggacctcctcgctgagtcagaaaagttgcaagccgcttggccacaggctccatgagtcgcgctccttagatcttagggtctggggaggggccagccacccaaggtcccctgcgggggacgtcaccag

SEQ ID NO: 52335 - DNA, 465 bp, Mus musculus
  source 1..465: mol_type = other DNA
gtgttcattccaaatatacttgtgcagataactagtacgaatacattcatatatgttaaattttacctgttttccataacactccagagtctggacacccacattcagtgtaggtcagcctgggttaccattcaatttaacctttactcactcgtgcaaaaatattgttttaatatcaacaactattgcagaattcatatagattttctaatttacgtctctaacctctgatctctgacagatcaaggacctcctcgctgagtcagaaaagttgcaagccgcttggccacaggctccatgagtcgcgctccttagatcttagggtctggggaggggccagccacccaaggtcccctgcgggggacgtcaccagccccaggtgcggagggcgggaactgcctcgtacctccccgcggagcgtgtggcccggcccaaggctaccctttctgacccgggcacacctgg

SEQ ID NO: 52336 - DNA, 420 bp, Mus musculus
  source 1..420: mol_type = other DNA
catgggaccccatagattattttcatgtgaatgtaaggcaacgcaacgtggttcaatttgcaatttttgcagatatttcaaaatcctagagaatttccatcacattctgagcaatggaaagtaatgatgtgaatggaatcatctgacatttgtattttccagtttataaaatgcctttatatcttgtcacatttaaagttcttagaaaatctccttcaaagagaaatgcgatatttctgatttacaaatgtgtggtctgatatctgagataggaaatcatttggattgggtgtgtcagagcctccaacactgtcagactcaaagccatttcgtaccctaggcaaggttcatatttgtgtaggttacttattctccttttgttgactaagtcaataatcagaatcaggggtataaaagccc

SEQ ID NO: 52337 - DNA, 306 bp, Mus musculus
  source 1..306: mol_type = other DNA
gcacacaactgttgttggataagatcagaggctgggccctgactgcctaagcccctgtcctcatactatggagaaattccaatttttttgaagaccattattttaaatagtttctatcattagtcctgctaggatggtttatgccaacagagaaggctggtcaaggcataaggaaacgtgtctcggtacagagcgcttcccatgctgaggacgcggtccttgctgtgccaggtccaccagggaccaggaccaatcaggacccgcggcgctccaggggctagggctcttggttcctcttctccgggc

SEQ ID NO: 52338 - DNA, 490 bp, Mus musculus
  source 1..490: mol_type = other DNA
aaaagcatggcgatgctcacagagggaagccggaggcactcgcggtccacaccccttctccctcgagcatttgcggtccagcaagggcaaggtggctggccaacagtttgacagagctgcttggcagcctctttgacacagtcacgtgaggcgtgctcgcagggcctgccgggagtagtactgccggcgggtcggggttcggcccaacatggcggttcctgtcggacagtgaccagaggaccgagcggcggcggtcggtgtccccacctgccagagtggcgctgagcggaggcagggacgggctcaggccccgaaagccgaagcccgggcagctacgcacagtcggctgcaggctccggagtggggccgcgcccggccgggcaggcgacggcggcggcggctgcggcaagctcggctccgaggcggggcggaggccgggtgcctggccgcggccatggcccagtgcgtgcagtcggtgcaggagctcatc

SEQ ID NO: 52339 - DNA, 386 bp, Mus musculus
  source 1..386: mol_type = other DNA
acgatctgtagaccaggctggccttgagctcagcccaattgttgcattacatattttgcagtattttatatataattcagtgtactgtgcatttgtaggaattttattttattctttactttttcattactaaggcactagagaacaagaaggccctggaactcactgtgtggcccagactgcctaaaccacaatgccgggcttatttatttttgaagcacagtcttgttcaaatgcagcccagctggcctcgaaaacgccaccaagtctgaggcttattaagattccaacttggaggccggatagagtcatcctgtctccagttgcggaactctgagtgcggactccgagtggagggttcaggtttcaccctccggggacctcga

SEQ ID NO: 52340 - DNA, 406 bp, Mus musculus
  source 1..406: mol_type = other DNA
tggagcgcagcggggactcggagctgcccatcacctccttcgactgctcagtgtgtctggaggtgctacaccagccggtccggacccgctgtggccacgtgtgagtgtcgggtggcgcgcccacccagcggggcacctggacaggtccgggaagacacccagggtatgtgtttccgacacattgcacattttggggctgtgcacatgttccaaaacctccagaggcttttgctgtagagaaactgtgcaaactctttcgcatgccaaaggctttctgaactcactggtttaaaaccctgctgcaaagtgactggaggttgtaaactacctgccacaggaaagcaagcagtagttgtttctaagaagactttaaaaaagaagcctcaggtgtatgctataacactgt

SEQ ID NO: 52341 - DNA, 306 bp, Mus musculus
  source 1..306: mol_type = other DNA
atacccgtttataattagactgtgtttaagggttttaacaaattggaactttcccccaaagttaattactaggaattaaatgggcctttatcaggcctattcaagtgcaaagtacatgccattcttcagttctagcattctttctttaaacaaaaaagtattatagtagaagactgcatctgtcactttgtttaaaatgaaaattcaaactccacagcagcagcgtaggctgacctttgaatgcaggccagcctggtctaattccagagcgcccgggttgccaaaggggccgtgctggccatcacc

SEQ ID NO: 52342 - DNA, 522 bp, Mus musculus
  source 1..522: mol_type = other DNA
gcaggccagcctggtctaattccagagcgcccgggttgccaaaggggccgtgctggccatcaccgcccccgccctgccgtgggcagtggcccgagggcgggctgcgagccgcgcaatgtcgcagactgcggctccgggggtgggggcttcacggtgctgcacgagcctcactcgggcttagtcccatgaggcctgcgccgagacggcgcaggaccaccgctcttccggcccgtgacggagaccgagcgtgaggcgcgccggggctcagggcatctgaggtgacgccggcccgcggaggaggacaggctcgccggcgggcgccggagcggacagcggtggagccgggccgccgggggcggggccagcggctccatggcggctctggggggcggggcttcggcgcgcgccgttgatagacttcacgctggtgtcccccgcggagaatgggcgggacctgctcgtgctgctgccttgtctcagggccccgagtcccgcccccgtcctgacgcaggccgcttcctg

SEQ ID NO: 52343 - DNA, 366 bp, Mus musculus
  source 1..366: mol_type = other DNA
gagtctctggaattcgaatcacagacacctatgaagagtcattattagttccatggaggtagtagaaatttcactgcagccaattattcctttagttaccatcctaggtagtctcattatggaaatatagtcaggaaacagctatttgattccggatttaataaactattattagagtctgaggaagacagtgagaggttggttgatccacatactctgtgcttgtgtgtgtgtgtgtgtgtgtgtgtgtacacatacatgtatgtttctttttgctgaaacaatgacaagttttagttgttcaatgttggcattactatagtaagatcaaaggccggaagttatgatgtttaacttttaaaagtc

SEQ ID NO: 52344 - DNA, 314 bp, Mus musculus
  source 1..314: mol_type = other DNA
tgctagaatgctctcccaagaggacactctgccctttcccactgagcgtcggaggagggtgcagtgacactcaaggtggacaacttgcagctgccagaggcacactgcccaccgcgaagaggactgcacctcgggctctgggaaggacctgcggagtgaggctgcagggcgccggaggcagccgagcgggtaccgcagtccccggagccaagaggcaaggcctctctggggaggcggagcctatactccggggaggcggagtctccgacagggaggcgggtgcggaggcggtgccggggcgggctgcgcaggcg

SEQ ID NO: 52345 - DNA, 398 bp, Mus musculus
  source 1..398: mol_type = other DNA
gtttgttgtgactcttgctagacacacagagcaactggaggtgcaggactccactccctgttctccactcccggatgcccaagacatcctggggattgctctcctttaaagaaaagaaagtgttttctgcaaagtagaaaagttcacttggccacagaatgcccatcattactattcctagtagtaggaatagacaactccttttgggagttcaataaaacttaagtgcatgacagaaagactatgaagttctcttaatctccttgaacaggtccactttaaggggcgggcagagggagctctgacttcagtctgaaatcttcaatgtttcttgccctgaagacatgggaatctgggcattcaagcggctggccaggctctgcctgcagtgctgcctg

SEQ ID NO: 52346 - DNA, 355 bp, Mus musculus
  source 1..355: mol_type = other DNA
ctgctgccgagtccactgagcgggtccccatcgcgctccgctgcacttccccgggagaagaaagggctttatctcttctctcagactgggataatcgaaggtgtccccagcttttaccagttgacctggaaccgccgccgtcggtcgcccgggcatggactcgagcccacgaggtgtcacggcctcattgccgccgctgctatcaccgctgttgctgccaagagagaagcacccttctggaggcgctcaggacccggcgccttcacacctccctcttaggttcggatcctaagagcgcagggagggaaccaagcccatcccccacccgtctgccaggttggaggagggtttaaag

SEQ ID NO: 52347 - DNA, 344 bp, Mus musculus
  source 1..344: mol_type = other DNA
gtctggagactgttatcctggtgagaaaaatctttatccagggcctaacgatttatatagagaagacacaaacttaaggtaaatataatttatatttcctagtgttttatgagagaaagcaacacttcaaaattaattttttacaaataaacgcttataccttgtcagaatgaatcaatcccttccttacttcaatcctgacaaaagtggagtgaatgaatagtttatgaattaatgaatttcacttcctttcctctctaacagttagctaatctgtggggagtgattctatcctacgatatcttacggtagggtaggaagagcccttgctccatcccaacttg

SEQ ID NO: 52348 - DNA, 229 bp, Mus musculus
  source 1..229: mol_type = other DNA
attaccttagactgaaaccccagctctggggagacagagagacatgaagatctctcaggttcacatgtcagctttcacacatagagcttgtctaaaggtgagtggatcctcacatgtacataaccagtatctgatttgccctgaataatgttctgtctgaccctttgaaaaggagtgctccttcacaccagatctcatgtgtttaaccacaattagtgcacattactgt

SEQ ID NO: 52349 - DNA, 550 bp, Mus musculus
  source 1..550: mol_type = other DNA
gtgtcagtgtcactctgaatatactaccaagaagggagaagttttcccgtgtttttccttccatctgtgtgaatcacattgtgaaaaaatgagtattctgacagaaagagtagagatttactgtcgatacatagtcaattatttacaatctataattgtatgtagtattccagtgtgaaaccacagctgttgtgtagagcaatatgtatgcaaaatgtggctgcagagatttgtgtgtgctgtgttcacacatgtatatgtgtgtctaaccttcaagttcctacagtggtgataataaaacaccaccacaaaagatggagctttcgtatttttgttgttttgagttaagaagaatatgataaactgttttaagagagctttatggaccagttaaaactggaaatttaacatagtggcgcatgacacttttattaaacaatgatgggatcatccatccatgatctacagtcaacttgctggggggattaaatcctaaaggaaggaacccatctttgaaggctcatctcagtaaacaccatctcctgcttca

SEQ ID NO: 52350 - DNA, 363 bp, Mus musculus
  source 1..363: mol_type = other DNA
ctttgtggctctttattttaaagcgatagcggcggccctccctgcctcggggctgcgctgcgggacggtggctggcggcgcctgcctccccggccaggctattgtcccacgtccttcgctgggagcctggcgcgtgtcctacctccaccagggccaggctggagttttgctgcgagaacgctggcggggagacacaggacaagtccgcgcgcccttcccacaaaactgtagtgagagagcccgtatatcccgttctaaaacgcagatgcctgtggggctgggaggctgccgcagcatccgcttcctttgcaagaagaagggaacagggggatcaggtcagatgtattgcacctagctgcctca

SEQ ID NO: 52351 - DNA, 362 bp, Mus musculus
  source 1..362: mol_type = other DNA
caactagattactcttgagtaaatgagtactctagtatgaaatacccttccagaaacaaatcttaattcaaaatatactggtgcatttatgatactcaacattttaaaagtgtgaaagatctaaagacagagatatcaataaattgaaagcgacatcctctcagaggtagtagatttatatcccttgtaggaatcttgtgacagaggggcgggggcaaacctcttcctctgcagctgagcagtaattaggtcctgagctaatggtgtcagctgatctgctgggatgcctccagccacctggctgccgcccggcccgctgctgcctctaacctgcagcctgcagcatgcgcccgtgacgtcag

SEQ ID NO: 52352 - DNA, 494 bp, Mus musculus
  source 1..494: mol_type = other DNA
tgactaaaattgcttgaaattgctatctaggtaatttaaaaatgccaaattaaatataaatataaaactggagatatatgcaaacattatatgcaaacatacatacagtaaaatgaatttccaatttcagttgatagaaaacagaaaataatattttcattattttcagtaacctatcttctaggaattgattatgatgaataaggaacctctgagtaggtgtgtaattaatatacacatataagatatgcttgttttccatattcaagctattaaatggaaatacattgtttgaatccttgggtttgaatcaaaatctgggtcaatataaaaaggatcattatatttaattttaatacggacgctgtttcttgaaggagaaaaatcttcatctggaaggatctgagtataaacactgtatttcccaggagaaatatttgacagtgtgtgcacgcgcgggggggtgtgcacgcgtgatgagatcatagcttcag

SEQ ID NO: 52353 - DNA, 407 bp, Mus musculus
  source 1..407: mol_type = other DNA
ttaactttaagtgcacattcatgtggccacacacacacacatatgtatgtacacacacgtatgcacacacacacttgcacacggaaaaagaggaataagttgtttttacagaggctgtctgtgaggggcacaggaaagaaggccaatgctgagctgatctccctccctaaaggttttcctcaaaagtttaaagccatgaatgtacaccaaaggcctgatgagtgtggccatgtggcaattcagacaggctcaaaagatcacccagtcagacagatttgtcatcctttagactcagacaaaaggatattttcagacaaattgacaaagagtgacattttaatgctagactttctagataaagacagaaacctcagcaaaacaagacagtgtttctttttggttttctt

SEQ ID NO: 52354 - DNA, 500 bp, Mus musculus
  source 1..500: mol_type = other DNA
tcctcaccagatcggtttggacagttgtgtttatcatagcaatagaaagcaaaataggacacttagttcacacacacacacacacacactttgtttcccagcgtgtgctaaagtgttataagacttcctgggaaaagcaagtgtttctcccctgttcttcccttggagtataaaacaaaagccaaatgaagtcagttctataacattattttctttagcacactgtaaagtggcctctgtcattctaatgggtccccaaacaaagtttataccactgtagccctagttattctgggtaaaatgataaccagggaacttcaaccaaaatatctttaaaatttgaacatagtctttggagtttccttaaactgaaataaaatccaggaaagttccttgtttgtgctgtatttccggaagagccttcaatgaacgcagttcctccctgagggagacctttgaaagcctgccattggtgagtttaccaaaggcatctaaaccaa

SEQ ID NO: 52355 - DNA, 462 bp, Mus musculus
  source 1..462: mol_type = other DNA
aggctgcagctgcggttcagagcggagggtctctttgaacccacccaacgctgcttgacaaacaagatggatcccaagccccggatccaggagtgatgagacccctgtctctgcacagggacggtgggcgcgcgccgcacttctaggtctgccctcaaagtgcgcagcttctagcagctctcagcccgggtggtgatccagacctccagcagaaggggccgagcactggaggcgcccacctacaagtccccgtctccccccccacccaaagagaggggccacccgtaggagcgcggctgcgctcacaccctggtgggtttgaagaccccgggatccgcttgctccgagatctgcagacagcagacccaggcgggggtgggagaggcgcggccaacgcccggcctgggagggaccgacccagtgcaaagggtgtcggggcgcgccagggctgtacagctttga

SEQ ID NO: 52356 - DNA, 345 bp, Mus musculus
  source 1..345: mol_type = other DNA
ttggttcctaactagatccccagagatccctaagaagtggagacgcattcttcccctaatgcagggaagggtgggggccacaatttgtttttcattaaaaacagctgctgcagttaatcaaaaggtagatttggaatatgtagatactaagtcattaatcgcgctatacgactaagaggcgcttcttttaattagtattcgtggaaaaaaacaaacaaacaaaaaagtcctaggggtctgacccggagttcctcagcgaaccacctggtcccctccccagctggggtctctacctgcaccctccacccggggaagaggcggcgccaagggggctctcccgagtgg

SEQ ID NO: 52357 - DNA, 364 bp, Mus musculus
  source 1..364: mol_type = other DNA
ggagacggggacttgtaggtgggcgcctccagtgctcggccccttctgctggaggtctggatcaccacccgggctgagagctgctagaagctgcgcactttgagggcagacctagaagtgcggcgcgcgcccaccgtccctgtgcagagacaggggtctcatcactcctggatccggggcttgggatccatcttgtttgtcaagcagcgttgggtgggttcaaagagaccctccgctctgaaccgcagctgcagccttggaggagagaggcagcagccattcgaccaggagcctttgtcccttgggccatggcgcgctgagtaattaatatcggtgacgctcacaccgcgcatgcccgcgcgtg

SEQ ID NO: 52358 - DNA, 469 bp, Mus musculus
  source 1..469: mol_type = other DNA
ccaagatgcagggtagatgtcatcatgacagcagtgctcacactggccaatttaaaatcataatgttttcgaattcttacacttaggtgtaagtttgctagcacttagtaagtgctcaacaaatgttacaataaaattttcattatgcttattactctgtatttctctggaaaaaatgtgtttaacactctgagatttaaccagatgctatagttcagaaacacattttatttaatggactggaacctgacattgcagatttgattgaatgactgcaaaaatcataatgttctgtaagtgttttaaaattgcatccattccaaaaagcaagacctaagcttttacaaatttaaggaaaaggaaatttgataaagctcaacattactgtatatggtagacataattttgttattttgctggcatactaggaaacctgcactatgctagcagcttgtctcataaacaatat

SEQ ID NO: 52359 - DNA, 422 bp, Mus musculus
  source 1..422: mol_type = other DNA
aggcaaattatttgaaaacaacaattgcactgctgcaatagcctgagtgttgtttaattcgtgtgtgagcttgcaaggtgatcatatgttcaaatgtaaactggtggttacataaataattttttaagccctcttgtagaagatgcagctttccttttaagcaggaggctgtccgaggccttggagcttccccaggcctgggtatgggtcagggacagcctggcgcgcagggcgggtccatgccagatgccggccagccccttgctctgcagcctgcagcccggggcgctcttgctgcgctgctctgcgaggcaagctgacgagttagcgggttgctatggtgacagatagccacgtgaccagccacagccgctgctgcaggcgccctgacgtgggagggcgtggctttcgagggcgtggcc

SEQ ID NO: 52360 - DNA, 443 bp, Mus musculus
  source 1..443: mol_type = other DNA
atttggtattttaaaattgctattatttcacaatgcctatgattattgatagtaaatatctgattcacatgttagctaacaaaagagaatttagttgtttctatgtgatcgtcttattacccttttactaactttttgaaataattacaactaaatgtaaaactattaataagaaataacttggtgtaaaaataaaatcgctcacaaagtaaagtaccttagctttttaaaggggaatttgctgttcttccagagaaacactcacatatatcagtaactacagttcaaataataaaagtaaatattttaaaagcatttgatgcttttgacaaccatttctggaatccgatctgagagcagcttggctttgtgctagggctgcagaggacgctgcggctgccgcccagacgggtggggcaagaattttgtgcgcgcgcgagcgg

SEQ ID NO: 52361 - DNA, 536 bp, Mus musculus
  source 1..536: mol_type = other DNA
atgaaacctcaggttaatagtattattgctggcttttctgaaacacattatgtagaccaggctggcctggaaaattctgagtttaaaggtatgtgtcttactaacattagaattagttttaggattatgtgaatttattcattcaacaaatatttctatattagacactgtgccacaaagtacatacaggatctagaatggtgagcacgtgtcgaaaacagcaagaatgtcatcccttttgttgtagtttgtagttggttttaagaaaaataagcaatgcataaaactgaccagatttaaccattttaatttaattatgtattttatcaggctcaacaccagtattttaatttaatccttttctgacactcagtctctctctcaaaacaatgatcttcgtgagtttgagggaaaatatatacatgtattttaagtcatttgaacacaccttgaaaaattaactctcaagatttggttcactataatctttgcaattttatcatgtgttcagttcctttgggtttcctagagggcgg

SEQ ID NO: 52362 - DNA, 247 bp, Mus musculus
  source 1..247: mol_type = other DNA
cagaagaactgaaaattcaaggcctgagccttggcttagtatgtcagcttgagaaaagctaaagttatctgaatggagggaatcttgagaaaatgcctccattattattaatgataggggacggcccggcccattcataagcgggtcccctatgctaaagctgggagtcgctttagggaactgtgcaccatagagctgtgatcctcccacattcctagagcggccaagcgaggtcgcattgcatcca

SEQ ID NO: 52363 - DNA, 332 bp, Mus musculus
  source 1..332: mol_type = other DNA
attcaaagtgtacttactgagttttctatgtaccagtcaaacaaagcacagctaagttagagtggccacaagcatatggaggccacctgcagctgccttaaacaaccagcatgcgtgtattctgctctctgtgactagccaaacctgtcgtagtctctgagacacagctcatggttagaggcaaaccttgtgtcaggggagtaccgggcactcgtggtggaacagagagcgccaggccaagcgcagccgcgcgtccccatggcaaccccgggcaccctcccgccccccgtcctgcggaccggaagccgtgcgcgccgggggcttgtgggaag

SEQ ID NO: 52364 - DNA, 355 bp, Mus musculus
  source 1..355: mol_type = other DNA
aggccagcctggtcaaggtatagggcgttgaattcatgacttggtttcgatgatcccctgacaactataagtaaaatttcgcaagcgatcttggactcctattaagattgaagagcaccctaccttcctagagtattgtgcagtactgatatgtaaatttcaaagctcagcaatctgttcgtgagtttgaggtcagacctgtcaggtcaggatgctcactgggaccctccaggcgcgtgccccaggtcaccaggcgggcgccttccgacccggaaggaacacttccgagccccgcctcctaagagccgcccgggaggactcggttaagctccaagaggcttgcggagtttccgag

SEQ ID NO: 52365 - DNA, 466 bp, Mus musculus
  source 1..466: mol_type = other DNA
tgactaatgatgctaagcattactagtaatcatctaaatattttcttataaaatgttattctttcatgcgcttgtaaatgaattattaacgatttaacataatctgaatacaaaccctatataagatacatggcttgcaaatctatccttacaggctagagtctcctttttagatacattattcttttaaagtccgcattttattcaaaatacagtttcctcgtggatgaattaacaggtcaattgacttggtttcaaaatattacattagcatttttaaaaatgacaccttaggtttgtggactgctttccaatagagtactcggaactagtaaaactgtagaggtgatttttaatgtcattttagttgcagctgcagcctcgtggctatctttctgtcctgcacagagagcagggctccggcggcctcttccggctgtgtgggccggtggcctcccctcaccgc

SEQ ID NO: 52366 - DNA, 676 bp, Mus musculus
  source 1..676: mol_type = other DNA
agttgcagctgcagcctcgtggctatctttctgtcctgcacagagagcagggctccggcggcctcttccggctgtgtgggccggtggcctcccctcaccgcccaccctcggtcgtgcatgcagtcgccagcgccgggcttggcggaaccactcatcccgccacaggtggctccgcatcaggcgtggccttgtgcggcgccccgggcctgagcgctgcgacggcgccttcgttttcagccgcccgcgaccgactcgccgaggtgccgccgtctgtccgcacacaggtgggcaccgtctcctgcccgaggccctggccgggacaaccggaccccgcgcatccggggcgggtgggacaggaagcgaagactcgggcgcagccggcggccgacgaggggcgcccgccgcgggggaggggtcgggcatccggtgagcgcggccccggcctcccccgcgcagccgcaccggccgccgcggccgagctcgtcccgcgaggactgcgcccgggcggccttgcgcgcgggtgtgcgcgcctcgctgacggggggacgccgggcgagcgccgactgcggctgcatgaggcgcggcgggaactagcgcgccgagcccgcgaggcccggcacggaggctgggggggaggcgggcgcggcggaggcggagctcgtgccgggcccgcctg

SEQ ID NO: 52367 - DNA, 550 bp, Mus musculus
  source 1..550: mol_type = other DNA
atcaaattttaacaatgcagcactgtgagaaacagacaggcatctatactacattttagttccaggggagagggccctaactcctgtagcgtgcattaattactcacttgagaagctaaataggaaaactatcaaataataatccctgctttataaacaaaggttaagtaaaatgtctttacatttctttgcaattcaatttaagttcgctatgcaggggaaaattggagaaggatgtcatccttgggatttcagcccgggaatcacaagccacgggtaccctaggttgacgcagagcccaggtcgcttgggcggctcctacacccctggagtgtgctggaccgcgcactcggcctgcaagcggggcccgcagcgcacgcacactagaggctctggtcaggagctcctcccgcgcacttccgccccagagcggaacggatactccggcattcgccagccggtccggatttcgaaggggccggggcggagctaagaagcccagctccgcaggccacgcctcccggccacgcccccgtctgctggcgtggtt

SEQ ID NO: 52368 - DNA, 434 bp, Mus musculus
  source 1..434: mol_type = other DNA
tgtagtcaaagccttcagcatgacccctcttccctgggaacagggctaacttgtaggagactggcagttaactccaggtcctgggcttctgaaattcaagacacctggagtatcggtttgacagaacaatgatgactgtgtttctctgtgtaaccctggcttctctgtatagccctggctgtcctggagctcactttgtagaccaggctggcctcgaactcagaggcgtgcgctacccttttaaaaacagggttttatactatattacctatttaatgttatcgattatccaaattgtcaagtgactacagttaatgtagcagagcagtgggggcttggcacacccgaggatgctcgccccccgcctccaggcggcggctcctttcccagggagagcagcgcgaggggcagggcccggcgtgtgacgtcactgc

SEQ ID NO: 52369 - DNA, 321 bp, Mus musculus
  source 1..321: mol_type = other DNA
gatctctgtgagttgctctacatagaaaggtcatagctatgtagagagactgtctcaagaaattaaattaaattagtaaaatgcattcattaaaaaaatgtgtgtgtgtaataaatcacaaaacaaagaaacaaacattcgttgagtgttcttgcagaggaccctagtttggttcataattccagttccaagggatcagaaatctgagttctcttttcaaaatgatggtagttaattgattaaccttgttaagctacccagaaaaatcttgaccgggggagccctgggcttgaggagaccggaactcctgtgtcgcgaatg

SEQ ID NO: 52370 - DNA, 754 bp, Mus musculus
  source 1..754: mol_type = other DNA
aatgcttgctttatgagggcttctgtaatgaaacatgttgaaggtagtttgaggctcccaaacctatatggggcccctaagttgggaggggcagctatcccgggctagtggggcgtgaggcggggccctcgaagcatcccggcttggtcccagcaccccgtctccgtggatccgggcctgcgggggctctgtcctgccgccccgctgcggtcggtgtcccgccgcccggccccgcgcgcaggttcggttccccgcgggaggtccgaagggactgggaacccgcgcagctccggtctccgagaagccgccatgagcccggccacccctcgggcccggggttgccgcgcctcctccaagcaggacaagcctcccgcttctagcaccgtggcgcacgcgcagtgcagccccggagcccggtctgccaagacttctcagacgccacgggctcgccgcgatggaggggcgggcgcgagtcctttcctcgagcccttccgctccacgccaggacttcagcccagtctggtccgctgtaggcagccgggcccgatggaaccgtctgggaccacgagctccgagtgccctgcctacagcggtcaggcctggctcacgcgcggagcagcggtcagagtgatgcgcgaaccacgccagcagacgggggcgtggccgggaggcgtggcctgcggagctgggcttcttagctccgccccggccccttcgaaatccggaccggctggcgaatgccggagtatccgtt

SEQ ID NO: 52371 - DNA, 158 bp, Mus musculus
  source 1..158: mol_type = other DNA
gctggtgctaggcttgctttctcccagtgctagcccagggagaattctataatgtctcagaggcacattaccacagtgattctaaatacagtgaagttaacactaaatattctagtctcctttcaaacccaattattttctcttgaaggagaatcggc

SEQ ID NO: 52372 - DNA, 399 bp, Mus musculus
  source 1..399: mol_type = other DNA
cagatgtctcagatataggtgatattggttctctcagcagtgctgagaacctgtgctctgagcttcggggtgcaggaagtcactcacaccatggtttcctttgaccacagcagaccaagtggacttgctgggctgcgaggatcccagattctgggccagtaggactcagagtgactcggagtcacttacgctcagtgaaaaaggcacgttcgggactcgcaggtgtcccttgatcagcgctgggctgtggcgatgaccgatgaccgcagagtgcgcgaccgggtcctgtcccaggtgggcaaaggccgcgctctccgtgagtcagcgagcttcgaggaggccggcctgcgaggcgccgcccctgggtggggacccgagtcacccggggttcagccctgg

SEQ ID NO: 52373 - DNA, 574 bp, Mus musculus
  source 1..574: mol_type = other DNA
ggagaatcggcaaatcctgcgtggtattgccactccagcctggaggaagaaggcaggctgtcaagctacatgcccgggatctgatcagaagcacccttcttcctctgtcgcagaaggtcaagttggacaggttcaactgtaactctcaggtgcaggagcccttgggcgcaagaaatgctgctgggattcctaggcccggggcttcggatcgctatctccacaggcctgcagagagccttgctccctggtctgggtgccgagccgcagggagaccagctcgctgttccctgtcccaggggtaacgtagtcagaggactgccttgtccccagtctagtgccagcgctccaaggctggtgcatctggaacctgggcagcaggcacacgtgcagggagctctgcgcaggggcgtttctgcgcgttgcgctgcgcgactctcgcattccctgtccctgcagcggtcgcgaaggtcggggaagcccggtccggtgcccagtaaaccgagcagggggcgggagcgggaggaggagggggcgagccccgcccccgccccgccccccgtggccggagtccggg

SEQ ID NO: 52374 - DNA, 522 bp, Mus musculus
  source 1..522: mol_type = other DNA
ccaaagtttaggatgcaacagctaactaatcctagaattgacactgtgaaatcttgtcagttagtgaactgggaattctaattatagtaaatcaaccttagaccaaaaaggcaaatcaaaccacctgatttgctcctagtgctgtgtccacacagcgagctcctgcaagggatggcagaggggcgcttccagccgtggctgagactcccccatagggcgggtcgccaggtgatgggcgagccgggcacccagcctgaagtggaaaggcccgcccctaggccggggtccgcgccacgctctcgcgcccccgcccttgccacccaggagggcgcggcgccccctagcagcggggcagaacgcggagcccggcaggaaggggcccgccgcgcccgccatcttgccactggaggcgtggagccggggccgccacgccccggccgccaggcttggtccccattggccgctcggcgcagaggcccgcccccgcctgcgcctccggccccggcgaggggagaggctccg

SEQ ID NO: 52375 - DNA, 401 bp, Mus musculus
  source 1..401: mol_type = other DNA
acattgtttagatccagtcctccgatagactgagtcgcccgggtacggtctcctcagattaattgactacccacctcgggagtctttcattagagtatattaaacgttacaagaatagattcaaaacccgattttcagttattgcaagagctgtaaagtttgtgcaaagcagtaatattggtagtgccaaacaccaaaaggacttctgctggaaatagccaattaataatcaagcctcttttttaatggaaactagaatgtaaattggccaaaatagttttgtgctttttttacactaattttcagtcgaagtttccgtctcaatcaaagcataagccatgcttcctggctccagcaagatggctggttgcatttgcacatgcgtacagcagcccgcccag

SEQ ID NO: 52376 - DNA, 512 bp, Mus musculus
  source 1..512: mol_type = other DNA
tcagcgctgccagctttggctcctttccacagcttggtgctgtacccagaggcactgagcagcggctggatactgagtggcagcatcattcctggaggaagcctccagggagatgcgtcccccaagcttccaggtgcctgcagcgcagcagggatgccctctgcagacaaatccagcatggcacgcgtcctcacaccgcgcgcagcggcggcggcggcggcggccccagtccccggcgccgccgtggacagccggcctgccggctgacgcgcccgaccccgcctcaggtctgcggccgtcgggctcagggcatgccgggcctgggcggcccgggtggctttggcagcggcacttccgccgggagctcgttcccgcgaccctggcccgggcttcccgcctcgcctcggcccggagcctctcccctcgccggggccggaggcgcaggcgggggcgggcctctgcgccgagcggccaatggggaccaagcctggcggccggggcgtggcggcccc

SEQ ID NO: 52377 - DNA, 520 bp, Mus musculus
  source 1..520: mol_type = other DNA
cgatccatccacataatatacatttatgtagctttttctttctctcgacaatgatcaatggatactcagctaactgggcggactccctccaagccggttggctttttctagtctaaataaataaataaatggagcccaccgccgcctgtgccgccgccccgcccgccttcgcttagcccgcctgtcgccctaacagagcgcagctaagtcaatgctttgaaaatacaaaaggttgcacctgctgctattacagagccacggtagctaacaggcacccgctgcccgcggctgcgggacccggaatctcagcgcctcccaaagagccatgcgcctggcgctatttgccctgtaccactgctgctccgcggggccgccgacgggggaggcgcgaggccggcgccgccccggcctccctgcccccggccgccgcccgccgccgtgcgccccccagcgcgcccactccctggcggtccagcctgtttaaaccgaaaggacagagatcctgtctgttcaatgtaaa

SEQ ID NO: 52378 - DNA, 366 bp, Mus musculus
  source 1..366: mol_type = other DNA
acatggcttctttagaaagacaagtccttaaccttgttcaatcttaataaaaagtttgacaagactttggccttctacagaatagtctagatttttctatcatctattatataacttaaaaacccatatttattatatatctatttcatgctgctttgtttctaataatttggtaaaaataaggatgatttatattcctgacatgatagtgagctaattcaatttttgtgcttgatttattttgattaatggactccgattaaaagaaaataatgtctctgaagctgcagcaacagtagccagcttgtgagatggcgtctgcccttaaatctcacctcagtctggaatgacgtttctgctgcagca

SEQ ID NO: 52379 - DNA, 597 bp, Mus musculus
  source 1..597: mol_type = other DNA
attgcatttcatttgttaattgaattccattaaatgataggtgaaaattacagctatgtttcttctttataaatctgctaagtgtttgttttttaaaagtgataaccttaagattcaaattaatcaaaatttgacaccatattttttcagacctttgaaagtaactggtaataatattatttcagaatttggtccaattcttgttatttgtttgcagaaacctattagaggtcagaacatttgactataaatgttactatatcagcagtatccaaatattaaaagtcatatctgagaattaatttaaaaagaattaattccatctattcccaagaattaatgtcaagtcaacctaatgttcagactataaattggtagtaagaacatgattatttttaatgtaacaatttacagtggatttcctccaaataagtatggcatgcatgcaatagttcacagaataatttataaattatgatagtctgataagtaggactcatttattttaatgtctgtatatcatcaggagaattttcttccgagtctgaatagcacattcaaatctagtagcccaacagttaaaataattggtctgga

SEQ ID NO: 52380 - DNA, 414 bp, Mus musculus
  source 1..414: mol_type = other DNA
actttcaaggaagtgaagttatgacatgttctggaaaagaaattcttttattgccatgtctagtagtgctttgatataagcacacaagtcatggcctttgaagggaatattctcttctgaacgtcctgtgatctcagttacccatgatacatcagaaaaaagaaaactgtatacagttgccttagttaatgtctgctgtggtggtccacacagccggagacaaagcgaaggctactcttgccctcacacagggttcccttgaaaagggttgagggcagcatgttgcaacagtccgcggtcactcgtggctgctgcacagctcagagcatccctgctagcaggggactgcatctcctgggaccaggcgaagacgcgccagggcggagtcacgtgctcctaggacttccgggttct

SEQ ID NO: 52381 - DNA, 351 bp, Mus musculus
  source 1..351: mol_type = other DNA
tgtgtcaaaaaatttaaaaattaagaagtatgtcagttatttagcccaaacagtatggcttgttacaaagaatctattatgatcacaaaactctagttctaaacttctgggaagaggagcacgacccaggcgggtgttcggctccagcggggtccagccaccccaggaggatacggcgggctctcggggcagccacaatcaaccggtgctttcccgctgaagcttggcagaacagtcttcagacttgactgcgaagaacagtgaagcccgaggccccgccctcttagggctggggaccctagaggcctcttcggctccaagaggcgggaccgactgtcctgcaggcctggc

SEQ ID NO: 52382 - DNA, 383 bp, Mus musculus
  source 1..383: mol_type = other DNA
gatttatattttaaaaacaccgttctttggtcttttgaagataaatacgttcaggatgcccttaaaaaaagactttaaaaaatgtgtatgtttatgtttatcctttttttaaaaagctgaatcctaaagctgagtcagcctgcctttctccagtgcagtgccagctttcgagggcagaactcggtcaggcaactgcttggggcaaggccgtagctccctaggcggcagcttgaagtgccacctgcagccttccgtgctctgcgccgcggcctggctcgggcggccaggcaaatttgcagcggccggcctggagctgggttgggctcctcaccctcaaggggagttttcccggagagactcgctcactgccatctgcgtgagcc

SEQ ID NO: 52383 - DNA, 341 bp, Mus musculus
  source 1..341: mol_type = other DNA
atcctacctttgggaaagataagtgccgccacagccaccgccggagacggaagccgcgagggtgggctcctacactgcggggagctcgcgaggctgcccgcgaggggggcggtcggggtgctggactacagaaacatactgaaatatctttcaatgatttgattatgttaaaaaaccaaaaagcaaattccagcatgcttgaggcgagttcaaggctagcctggtctacaaaatgatagaagcccaggttagtgaggccttgtctttaaaaatgttcacagagaggcgtggctatttagcaaattccctgaatttaatattgagaactcatcttgttggtg

SEQ ID NO: 52384 - DNA, 335 bp, Mus musculus
  source 1..335: mol_type = other DNA
cctttttttaaaaagctgaatcctaaagctgagtcagcctgcctttctccagtgcagtgccagctttcgagggcagaactcggtcaggcaactgcttggggcaaggccgtagctccctaggcggcagcttgaagtgccacctgcagccttccgtgctctgcgccgcggcctggctcgggcggccaggcaaatttgcagcggccggcctggagctgggttgggctcctcaccctcaaggggagttttcccggagagactcgctcactgccatctgcgtgagcctgggcggtcctcccagagcttcgggtccactgggcctccggtgcctgctggga

SEQ ID NO: 52385 - DNA, 341 bp, Mus musculus
  source 1..341: mol_type = other DNA
ttaagttagcagaatttactagtattcactactaagccaagcactatagagtcaccaacaagatgagttctcaatattaaattcagggaatttgctaaatagccacgcctctctgtgaacatttttaaagacaaggcctcactaacctgggcttctatcattttgtagaccaggctagccttgaactcgcctcaagcatgctggaatttgctttttggttttttaacataatcaaatcattgaaagatatttcagtatgtttctgtagtccagcaccccgaccgcccccctcgcgggcagcctcgcgagctccccgcagtgtaggagcccaccctcgcggc

SEQ ID NO: 52386 - DNA, 314 bp, Mus musculus
  source 1..314: mol_type = other DNA
atatttttcacacacaaaaccatttaaggttgggtatagtagcagaggcaagtggctctcttagaccaggctggggctttgaaaccaagtaaaactctatctttctcaagataatcaggctatagtgctggcttctttatcccgcgacggggtttctgtgcagccctggctgtcctggaacccactctgtagaccaggctagccttgcctctgaagcgctgggattaaaggcgtgcgccaccactgccgggctgtgtctcagccgccctacggtagacctgcggcacaggcgcgcggggcgtagcgccgtgagg

SEQ ID NO: 52387 - DNA, 358 bp, Mus musculus
  source 1..358: mol_type = other DNA
taaaggcctccctggctgtcctggaactcactttgtagaccaggctggcctcaaagagcactgactgtacatggtggctcacaactatctggtctgacatactcttttgatgtgtgtctgaagacagctacagtgtacttatatacataaaaataaacaaatctttaaaatttttataattgtttaagctaactctgatgtcacatgtctatagactcagtagccagcctcgtctacgggtctgtaactccagctcctcacacagacatgtgtgcaaacaaaacaccagtgcacatacttttttttttaaaggaatcaaagagaataattcaatatgctttaaacatataattgcaca

SEQ ID NO: 52388 - DNA, 513 bp, Mus musculus
  source 1..513: mol_type = other DNA
ctgttaatctccttttatcagtagtgcttcactatagaggagtctgggtttgatttttattatgaaataccgagggtgcggtctttgtataaactgagtctctttctgtaatcccagcatgtttgaggacatcatgaattacatgaactggtgttaggtctaaagcatcagacagaaaagataccctggaccttgtcctctctgagaggggacagcacagactaggcagttggtgcctagaaatgtcttggaggcataaatcggctgtttttccagcctggggcagctgcgcgaaatccaaggaagtgcgcgcgcgtgcgtgtgcgcgctcgctccctggctctggcggctaacacccttaaaagtgtctcagggtcattccctttaaaaggaaacgtgaccgacccactcaagtcgggagtctctagtgtcagtctctagtgttcccagggttgacactagcttcgggcactcttcatcccagctgcaggctgggtggagccgccctcgcgg

SEQ ID NO: 52389 - DNA, 334 bp, Mus musculus
  source 1..334: mol_type = other DNA
aactgtgacttcaaaatttttcaattgaaaattttaagtctttggaaactaataatattaatgatatcagctgtgatgaacaagccttgcctctgctgagaggccctcccaggcaagagccaggcctgctgggctgagctgcatccccacagcacagacagcgcccccattataaggcgcctgcagctgtgctgggctctacataaaggccatgatcccagtaagcttgggatcctggcccgttgccatggtagtcacacacttggcctctgtgatactcagtggaatgaagcagcttttcaggttctgaggagctgtggactctcctgctctc

SEQ ID NO: 52390 - DNA, 454 bp, Mus musculus
  source 1..454: mol_type = other DNA
ccccagaaggtggacttgggagggtcactggacccctttggtggtttcaatgatactagcccccactgattcatagatttgaattgggatgggcattgaggtttcaaaaaacccattccaagtctagtctctgctgtctgcagattgagatacagaagctggatgccaccatgcttcctgccacatatttcttcacagcgacagaacactgactaagacaatgaataaactctgttttcgattattacttttaaaaaatttgtcctactaaagcctagctggcttgggctgccaggccagtactcagatgtctgagagcagtgcttcgaagacactgaactgtctgaacagtcagctgattatcacccagggcttggcaggtgataagcagagcttttcagggcacagaccctgaagagtgagctagcaggcagtttccaggctgctggctggg

SEQ ID NO: 52391 - DNA, 428 bp, Mus musculus
  source 1..428: mol_type = other DNA
agctttttaaatccccattagactggaggaacaggaataatcctttttattgaaccctttatcgttgcaacaaagagtataagccattactgcctcaagccttcctgactgaggactagaaaggttttagacaggcccaggctactcctcctggttatcatgggctcttaagacaaagatctgtacttgttgaccagatggtttttcagttataatttagttattttgtaaagaaagaaagatcatgaaaagttttataaggactagtcagtcatctttataatgttaaaatgtaattttagcgagttttcattttttcccaagaactaaaatgaaacccggccgaggccggtatttgtgccatggcgtcatattaccatagcgtatcctgattggccgacagcagggtgacggcgcctgcgcattgc

SEQ ID NO: 52392 - DNA, 323 bp, Mus musculus
  source 1..323: mol_type = other DNA
aggaggggacactctggtgtctgtgtcacctctcctctcagtttactaagatcttattccttggtaccgagatggaaaaatctgattggctgggtcaacgagctccccattctgagcgaggactttgtggagcagcaggaaccctggcagcttgcaaaacgcaaagggctactggccagctgagtcagaagcctccttctagtacagatcactgatggcatcctagattggtgatatatgtaattatttttgagtgtgctacccacgaacaagctatatctcgggcaaaaatgagaccacatttgtccttcggtaggcagagg

SEQ ID NO: 52393 - DNA, 345 bp, Mus musculus
  source 1..345: mol_type = other DNA
atgaaaatttctgaaaagagatgcagatgttttgatagtattaaacaaaaaacctcagctagctagcccactgattaatctgtattttatctcctgggccaaatcacgtactggatcaactgatttgtgcgcatgcgcaaaactcagtggccccgctgcgcgcgcactccccccctcccccgtctgaagccctggaaacggcgcagtcggcggtgaggcggagccggtgcgccgagcagagactgcgcaggcgcgtgctcgctcccttagccgggcgcgcggatgcagcgggttccgctctcggcgggcggaggggttgcgcgcacacgagcgagccgccgtgac

SEQ ID NO: 52394 - DNA, 403 bp, Mus musculus
  source 1..403: mol_type = other DNA
tatttattatatgtaagtattcagacactccagaagccctgaattaaatttcttaaaagcattttacagcctggtctacaaagtgagttccaggacagccagggctacacagggaaaccacattttatacccagaaggtttggtagtgcaagttttcagtggatccttgaaccaggaagtaccaggtcctagaacatcactaggagacactagtctcattttcttatagaaagataaaatgttctcttttatcttaattattcacagaagaattgaattattctcactttatgactagagaaagtctgcccctctttaataagaggaggtctcagaagggaaatagatttgagaaaagccacttagcaacttgtttgaaacagtggttcagcacaggtgacac

SEQ ID NO: 52395 - DNA, 319 bp, Mus musculus
  source 1..319: mol_type = other DNA
aaaaattgttttgcacatctttcctttgccttcttttaaaattggacaacagcagggaggggcgtggtggtgcacgccttttaccccagccctcgcagatctcaagttcgaggtcagcctgatctacagaaggtttgtcatgctatccttggtgagacaccaagattattctttggttccgacataggcaaaaattctacagatgtgtatttcccacctctctcgttcggagtttccagaaacccggcgtggtggaacacgcctgtaatcccagctcccgggagcctgagggaacgcctccagacttcagaggcgggac

SEQ ID NO: 52396 - DNA, 351 bp, Mus musculus
  source 1..351: mol_type = other DNA
ggctagacagcaacttttgcataaaagacttgtatactgaattttggtatccattatacatcctagttgtttcatttgcaaaatgctaataaattaacgtttccctggtagggcactttcccagcccgcggggactcagggagtccagggccacgcacgcgaattggggacagcataggtagttcccattccacgtccggggagtccctgacctgcagcccccagtgcccgccctccaggatccctcctcctgggcggtgagatccagatcccagaatggccctttaaaaggcagtgtcgtgtccggagggggcgggctgggggccactgacccgcccgcggctggtcctt

SEQ ID NO: 52397 - DNA, 363 bp, Mus musculus
  source 1..363: mol_type = other DNA
tggtccctaactaatgcccatgagggctcagccaagaccagctgttggccatagccatgttccagctctgagcaggcactgagaagagagatggctgctcagttgcccctatgcttgaaggcaccttcactgggagccagggtggctctgtctgcctacagctgggtcaccaagactacagagagggtcctaatctctctcttcgctttcctcctgcatggggaaaggagagttggggagctcacagctctcagctggaaaaaggcaagcctgtccctgtccccaccaggccccagcccagatagagccatgaggggctatccctggcagaagcacagattgtacaatctcagattttaaagg

SEQ ID NO: 52398 - DNA, 350 bp, Mus musculus
  source 1..350: mol_type = other DNA
ctaatgtatataatcttagtctttaaactatttaagcaaatattttccagggctttaaaatgcctgcattcaagcaggagtacctatggaaatccaaggtggagggaacacagccctgaagtccattgaccagccagcctagctggattcatgagcttaagattcagaagagaccttgtctaaagacttgaccttgagtcttattttttattttactgagtttgtttacacaataaagattagaatacagatggcttactttttaaatttttgcattattactcttcaaggttcttagtttattcaatcaaagaaattaagaatggaaagcaaaacaaagaaaggttata

SEQ ID NO: 52399 - DNA, 454 bp, Mus musculus
  source 1..454: mol_type = other DNA
cagtgctgacgtgggaaggtgctagcaaggtgacagcactatttagataatgatacagttagcaaccctttcaggtgccacaaacaaatacaaacattatctgctttgttgaatctaaaatgtcatctcaattattaatcgagattgggttcttacacgcgcgcgcgcgcgcgcgcgcgcacacacacacacacacacaaaagacttaggattgctaatcgacatcattaatatacagcctatacatgtcctgaaatataccctgtaaatacatacaattaatgctaattaagaggaataattgtaaaaagaaatgtttagattagttctgtttctaaggcctgtgtgcccctatttggacagtgcccagccaggccacccgggtctcctgtgggacttttcccgtgctctcacgggagggtgggggcgggggagctctctatctgatagtggc

SEQ ID NO: 52400 - DNA, 291 bp, Mus musculus
  source 1..291: mol_type = other DNA
gcatggaaaatttcagtcttataccaaggcacatatgtatgtatagataattaggttgatatgataaattctcacataattttatagcttcaacaattatcaatcttatttcaactgaacatagttctggaataattttttacacggtgtagaacccactctacagcctaggctggccttacagaactgtgttagcgcagctgctacatcattagaatttgacaaacatattactatcaattaaaattaattttcattatttgtttgcttgagttcccaggctccgagggg

SEQ ID NO: 52401 - DNA, 419 bp, Mus musculus
  source 1..419: mol_type = other DNA
tgtgtacaaagcactgacatatattctgtaggaaatttgaaaatttagggtgcacccagatttaccttcagtgtctctatttccgaaattttgctatgtaaaatgctataataaatggaagacaattttgagtcacctttagcccaagatcagtgattttaaaaataaaatttggagcattgactgcagatctgatgccctcttcaagagtgtctgaaggcagctacagtgtacttacatataataaataaatctttaaaaaataaaaataaaataaaatttgttcaggtaatattacacagtgactgtgacttctgacagagataagctaatatgagataatgcctcttcattttgtttgcctgtttcgccttcctgggtgggtgaggagctcctctgacaagggctgtacttcccac

SEQ ID NO: 52402 - DNA, 458 bp, Mus musculus
  source 1..458: mol_type = other DNA
gaaaaaaccttctctgacagggcctgcccagctgctggtcttcagatgctgaagtgcccttttaggagctctaacagagacttcaatcaaaggtgagtcaggtcagcatggagttccagcagaaggcagcctgccaggagctggcaaccacagagggagggactcgcccgcttcgagcctcgctccccgactgagaggtctccttctaagctgccggctcctgccgagggcgaggaggaagatggtcctagtggcttccccaggcaaatgctttaggtggccctgcggcagcctcagcctgggggagggcgcctgagctctgcggttcccctggcggtggctccgggttcccctgcgccggtgctcgcggtctcgggcatctccgcccgccctcgctcccgagcgcggaggcgagccgcagcccagcgcggcggtgggcgtgtgcgcgctgaaggacg

SEQ ID NO: 52403 - DNA, 433 bp, Mus musculus
  source 1..433: mol_type = other DNA
caattctaagaacttaatgagaaacattttccattttttccaaggtattatttattcttactgcagatctatcaaaaataatgactgcagtccttcctcctctcattttctcaagataaagtatcttagtaaatgtaattttgaaacaacctgatcttcagagttcagacttgtaagaatcacaccaggataactttatagctaggataaatgtttctccttttcttatctgaagacaagaaaacccgttgcactgttttactgtccagcaccaggctagaaagcaatctctcaatgggccatggtacactggctcggatccaatcccctccgaggattcgggcgccttcaccaaggcagccttctgccttgctgtggctggaaggcgtcccgcgcccattggctgctgccagccgcgctgggcgggctggaa

SEQ ID NO: 52404 - DNA, 639 bp, Mus musculus
  source 1..639: mol_type = other DNA
gtgcgcgcgtgtgattgtgcacgcgaccgtgcgcgtgtgcgtcctcctgcccgcagcccctgaccccgctgcgccagcttcgcggtctccagcctcgggctttccccgcgcgggggcgatcgccgcggggagcccgaaccagctaggataagggcctccgagcgcgtcctgatgctgccgtgggcaccattttacaggacataaaagggaaggcggcagggccgtggttgtcccggttgcagggctgcgccgcctctccttggcgggccgcctccgcgcctggcacgcccccaaaccgcgtctgcaaagccgccgcgcagctaggctgcgagcccgccagagtgcgcgctgcggtcccggggctgttcggcgcggtcccctccccccacccccccggggccctgtgccctacggcggcggcggcgcgggtgcgggggccggggagcgcgcgcaagttggccgcgcgcccacggggccgcgagccgccgattcctgccgagtaagcagtctggctccgcggtggcagcaaggctggggcgctggccgcgcgccagctccatcacgcaaggcagggaacccttcccctccttttccgaggctgccttggaagtgaagcgggctggggttttgtttcccttc

SEQ ID NO: 52405 - DNA, 640 bp, Mus musculus
  source 1..640: mol_type = other DNA
ggagagagaaaagctctaggctctagcgtctccggttgctcttacagcctgtgcgcgcgccgggctgaaagtgtccgagtgcgcgcgtgtgattgtgcacgcgaccgtgcgcgtgtgcgtcctcctgcccgcagcccctgaccccgctgcgccagcttcgcggtctccagcctcgggctttccccgcgcgggggcgatcgccgcggggagcccgaaccagctaggataagggcctccgagcgcgtcctgatgctgccgtgggcaccattttacaggacataaaagggaaggcggcagggccgtggttgtcccggttgcagggctgcgccgcctctccttggcgggccgcctccgcgcctggcacgcccccaaaccgcgtctgcaaagccgccgcgcagctaggctgcgagcccgccagagtgcgcgctgcggtcccggggctgttcggcgcggtcccctccccccacccccccggggccctgtgccctacggcggcggcggcgcgggtgcgggggccggggagcgcgcgcaagttggccgcgcgcccacggggccgcgagccgccgattcctgccgagtaagcagtctggctccgcggtggcagcaaggctggggcgctggccgcgcgccagctccatca

SEQ ID NO: 52406 - DNA, 636 bp, Mus musculus
  source 1..636: mol_type = other DNA
ttgttatttctgtatccagtgcttgactcaaaaaaaaaaaaaaaacattctataaatatacggcttaaaattgagttttgtaaatgtgtcttttctttgttaaaatggaaaacattgcttttaatgacaaaatgtcaatttaattaggaactaatcttcactaagaaatctctgacagttaccatagtatgataccctgctgtatttctagctattactttactaggaaaagatcaatttttacatgaacttaaaaggagagagaaaagctctaggctctagcgtctccggttgctcttacagcctgtgcgcgcgccgggctgaaagtgtccgagtgcgcgcgtgtgattgtgcacgcgaccgtgcgcgtgtgcgtcctcctgcccgcagcccctgaccccgctgcgccagcttcgcggtctccagcctcgggctttccccgcgcgggggcgatcgccgcggggagcccgaaccagctaggataagggcctccgagcgcgtcctgatgctgccgtgggcaccattttacaggacataaaagggaaggcggcagggccgtggttgtcccggttgcagggctgcgccgcctctccttggcgggccgcctccgcgcctggcacgcccccaaaccgcgtc

SEQ ID NO: 52407 - DNA, 383 bp, Mus musculus
  source 1..383: mol_type = other DNA
tgttatgttgtaatttggtaatttgagaatttaaaattactattgaaatcctcactccataacccagctagactggggcttagcccaggctgccctctaaatccatactgcctgttgtttatcgattgtccaacactttcagacagaacctgaagcatgtatgtcctagatactggtgctcctcatccggaggagaaccgtgcacactggccaaatgctctgggcccaggaagggtgcgggacagaaccggtcccacaaagggaccggccgggacgccgcagcctcccgcgatgcacttctccctccggccacacgggggcaggagagagcgcggcagccgtggtacagtccgttccggccctcccgggggacagtgggctct

SEQ ID NO: 52408 - DNA, 457 bp, Mus musculus
  source 1..457: mol_type = other DNA
aggtgtcagctttagctctaaaatttagagggagaaagcatgtactctctgcaaggttgaagggaaacaaaaccccagcccgcttcacttccaaggcagcctcggaaaaggaggggaagggttccctgccttgcgtgatggagctggcgcgcggccagcgccccagccttgctgccaccgcggagccagactgcttactcggcaggaatcggcggctcgcggccccgtgggcgcgcggccaacttgcgcgcgctccccggcccccgcacccgcgccgccgccgccgtagggcacagggccccgggggggtggggggaggggaccgcgccgaacagccccgggaccgcagcgcgcactctggcgggctcgcagcctagctgcgcggcggctttgcagacgcggtttgggggcgtgccaggcgcggaggcggcccgccaaggagaggcggcgcagccct

SEQ ID NO: 52409 - DNA, 663 bp, Mus musculus
  source 1..663: mol_type = other DNA
gccccactcggtggtgcggcggtctgtgactgcgacagtccaaggccagcgggggtcctggcccaccagtgcctggtcccggctggccgctccgagggcgtgggactgggaccgcagaacgcaagggtcggagcagaactgcgccttgccggtccagagccaaccttccggtctccctgggaaacgaacgcggtgacctcgcgacagcagcgcggctccggcagcgcaggcgttctctccaggacctgcaacgccctccattgagaccccgccctgaaggggggcgctcgggtcaccgtcccggggctccgccgacgccccgggccggggctggctgtacctgggctgctcccgcccagggctccgccccacgcgcctggagccacagaggcctggcaccctgggtcctgccgcgcccggccgcaggtccgcagacgcccggcttttccaggacctttgggagttcggggaccctcggacggaagccgcggccctgacctcccccagttggtttcgggtggcggagggagtggcgaccttcgctgctcgccctgcgtcccaggttggggatgagaagcagagcgctctgcgctctgccttccctgtaagggtttgcggggcggggccggcgctggaagtgcgcgccgggcggggatcgggagc

SEQ ID NO: 52410 - DNA, 213 bp, Mus musculus
  source 1..213: mol_type = other DNA
gggactactctgagttctgcccagtctggaagagattgcgcaacatcagtttgtataataagtgttaacacccaaagaaaattgatagaaagctgtctgatagctgtttgagacaaaaaaccgatttagaggcagggcataggctgctgcggctgcgcagtccaatccctcattccggagcagcgggacgccggccagccgctcccatcgcgc

SEQ ID NO: 52411 - DNA, 211 bp, Mus musculus
  source 1..211: mol_type = other DNA
cactgtgatgtcactgtgaagtggaagcactgagggggtcagtaggaaacgggccgtcttggaacctgacagctggagttagctctccaggacccatgtactataggcaattgtaaattacataatactctgtagtagtaaatgacgtattctatccctgtatcagctaggctgcgaatagattcacaaacaatcagtactaaaacacaga

SEQ ID NO: 52412 - DNA, 583 bp, Mus musculus
  source 1..583: mol_type = other DNA
atgaatacacctttaattaataccaattaatacctttaattaactgataccaaatagcctggttgcacaaggccctgtctcaaaatcagttttaaaaaatttcctcttttaaaccgagcttaaattaaacttttacactagaacttaatgtgactcttgtccttttaactcagaaatcagtaaatgaaatgtaactatgcattatggtagtaattaacagcatgtattgtatgcccgggggtgctttaaatatgctctgcatataccaattcctattttatgcttgttctcattttataaaagaagaaatctaatcaccaaactctgaggtcagacacaagtcactctgctctgtccgaaatacagttgtaattagagttaatttaccgaataagttaatgatttgcaatgtcaagttattcgttgtcattcgcggactagaattatgtttctctgctgcatctgaatcatgggaatgaaacctatttaccgcgcggggcccgcgtcaggctcatgctgaccagggcgctccccattccagtcaggagcctgcagattgggcacacgtgaccgacatgtggct

SEQ ID NO: 52413 - DNA, 473 bp, Mus musculus
  source 1..473: mol_type = other DNA
agaaaatgtcttacaaatgttagtataactcgtcttttcgaatcactattatttatgtaatccaataaagttatgtaaaagctttatgtttctctgctttatgtcactttaactgtgacaaaaaacaaaaaacaacgtatgcaaaaatatgtaagtttagggtacagttaagtgtcgaacattaatatgtatgcagcacagtggcggttaagagcactgactgctcttccgatgccctcttggacagacagagtgcttacatataataaataaataaatctttttaaaaaaacaatactaatcctgcgtacagagactccgtcccctgggtgaagagccccggctacaccgggagagcgcgcactgccgggtgtgaaaggtaccggccccgcacggccggccacggaactcttctcgcgggaagaccgtcgagggaaaggctaccggacgctttggaggtaggacttccgccg

SEQ ID NO: 52414 - DNA, 381 bp, Mus musculus
  source 1..381: mol_type = other DNA
gcaggagacctcacattctctgaggtttatgtggaagaacctggacaccatcgttcacactcatcttcccggtaactgtgcatttagggaagtgaagattgccacttcgctggtagctgctaggaggaggctagactaccttgcttgaaaaatagtgtgccctagaggagggcatgtgagctttctccaggggaattttcaaaactaccctgagtcctggcacaggagggaagcaggcctgctcacagacttgctcatgcaccggatttaaaaagtcagggtgagcgctcggctggggcagggcggggtccgcgccaacagggcgaaggcgagcgcggggcgcgctcccggaaacctcgtgcacgagccgcggcaccgccc

SEQ ID NO: 52415 - DNA, 425 bp, Mus musculus
  source 1..425: mol_type = other DNA
gggccatctgcccaggggtagcactgcccacagtagggtagtgaagtagattcctcaaaggagaatcctgcttctcaactgtatgaagttaacaattaagatcaaacatcacacttgatttgtgaatgtgctttgtaaccaagtttcgttaggaaaacactagccaatgtcttttttgggggtaagggggagatgccctgtttcatttaaaataaggaaaaacctctgatacaattaaattctgtggtacaatcatacaaccatagcataaaacaaaagtggtcacttctgcttaatgggaaatctccaacatgtcctaaacatcatgtaaatatagttgctagaatttttggttgttgacaacatctggagttaactaaaaaacccaagtggtatttttagttaattggaccatttaaagtcca

SEQ ID NO: 52416 - DNA, 522 bp, Mus musculus
  source 1..522: mol_type = other DNA
tagttaattggaccatttaaagtccaaagacccactccagcctagtcgactgaacaactgctgattcttggacgttgggagacagccattgttgataaaatattcctttatatattattagatcaattctatccactaatgcacgatgtatactttacatttctgggtgttaaatttttaatttacaacctgccagatcatatcatgcataaatggacacgttttttaaattcacacgtggatgtatttaataagtgaatggactccacatatagaccaatgttgtcctctaaatccggaccgaacaaaattggataaccatgaccttgtgtgtgtgtgtgtgtgtgcgcgcgcgcgcgcgcgagcgctaacttggttcctttattaaatcaacaaaacaattttctttttacatccagaaaaatgaggtgaagcgcgagccttggcggtgccctatctgcgcaggcgcacacagggcaagcgcagttgctccgttagcactctgaggcactactgcgcagg

SEQ ID NO: 52417 - DNA, 256 bp, Mus musculus
  source 1..256: mol_type = other DNA
tcacttttcataaatcttgtgttaagtcctgtaatctctagttttagtaccagaagttctctgaaaatggttaacacttcgcagcttctcggaaggtttatgaaattctcagagattcctggacggcctgggcacagcttaacacaggacctccgcacccacaagtgggcgggccggagccgccgcagtccagcgccgaatccgggttgaccggggcgccgcgcgctcgccccgcctctcgcgtcacttccggccc

SEQ ID NO: 52418 - DNA, 314 bp, Mus musculus
  source 1..314: mol_type = other DNA
ttaaatttaacatggagagatagctcagctgttaagagccctgactgctcttgcttctggtgtgtctgaacacagcgacagtgtactcatgtacataaaataaataaattttaacaatgattgtaagtaatttaaagaaacggtggcagagacagcctctggcagcttccgctccatcgtcaccctacagtcaccaagggaagaggtagagacagtaggagggtccctaaaccgtccctctttgattacccgtaggagacctgcttcagcccctctcagtctgggagagaagggcgtggtctccttgaaggctt

SEQ ID NO: 52419 - DNA, 326 bp, Mus musculus
  source 1..326: mol_type = other DNA
ggattaggggtttccaccaccagaccaccaggccttgcagtaaatagctgagaggtgtctgatttatctcatttacagcgtgtggataaggtacacatccttcaagaaaggaggtatttccatccctaaggacctacacagtaaataaaattgtttttaaaattagtgtgggaattgttgccctagattaaaactaactagagccatttaaaacgcggctggaattggccctctgcagccaccgttaggtcctgcaccaagtggcccctacggggtggggccccttcactgaaaaacatagcagtttccgtttttataaattaatc

SEQ ID NO: 52420 - DNA, 392 bp, Mus musculus
  source 1..392: mol_type = other DNA
cctcctaactaagaaatattgctcatatttttgttgcatagacttagaagtaatttgattgaacctttgtttctctataaataaatatttcgcaaactaaagattttgcttggtttttgagtcagagaatcaaaacctaggatggtgtgctgggattaggggtttccaccaccagaccaccaggccttgcagtaaatagctgagaggtgtctgatttatctcatttacagcgtgtggataaggtacacatccttcaagaaaggaggtatttccatccctaaggacctacacagtaaataaaattgtttttaaaattagtgtgggaattgttgccctagattaaaactaactagagccatttaaaacgcggctggaattggccctctgcagcc

SEQ ID NO: 52421 - DNA, 196 bp, Mus musculus
  source 1..196: mol_type = other DNA
tctaatatgggagagtctactacaggttttaggatcccaaggcagctggggcgcgcagcaagactcctgcggctggagagcacaactccgcccacgaggaacagctttgttcctttttaaactgcgcgctgagcttgtccggccaattttattagttaaaaagcagatttttttttcctagaggaacttcgcttct

SEQ ID NO: 52422 - DNA, 412 bp, Mus musculus
  source 1..412: mol_type = other DNA
agagactagcctggtctgcatgagttccagtccagccaacatcaattattatcaacaaatcttgattttttttttcaccgttccaatgaaatatcaccattactggctacggtactttttattgaatacacatttttagaacatcttgtttaaatgccacggctttaaggtggtctgcttaaaaaaaaaaaaaggtaataaggttctcatttttaaaaaacacttctaaaacgttcagttttcggatatgcggttcccggagacgcgttttcccctgcggcaggaaaactcggttagataaacagcagagtcgctggccacttcactaaggcagatctctgagctctgcgctctccgacaacccactcctcccacgcctttcacgcctgagaattgggatgctacaacgttg

SEQ ID NO: 52423 - DNA, 259 bp, Mus musculus
  source 1..259: mol_type = other DNA
accttgtataaacaactgttagctgaagataccacccagagaggcagagatgacagagcagtctgacaacaggtcctttcggacaacagatctcagatctgcagctgtggattctaatatgggagagtctactacaggttttaggatcccaaggcagctggggcgcgcagcaagactcctgcggctggagagcacaactccgcccacgaggaacagctttgttcctttttaaactgcgcgctgagcttgtccggccaat

SEQ ID NO: 52424 - DNA, 299 bp, Mus musculus
  source 1..299: mol_type = other DNA
atttttaaaaaacacttctaaaacgttcagttttcggatatgcggttcccggagacgcgttttcccctgcggcaggaaaactcggttagataaacagcagagtcgctggccacttcactaaggcagatctctgagctctgcgctctccgacaacccactcctcccacgcctttcacgcctgagaattgggatgctacaacgttgagaagcgaagttcctctaggaaaaaaaaatctgctttttaactaataaaattggccggacaagctcagcgcgcagtttaaaaaggaacaaagctg

SEQ ID NO: 52425 - DNA, 301 bp, Mus musculus
  source 1..301: mol_type = other DNA
ctaaatctctgtttctaagaattggacaaggcccaagctctggcaacggttctgaaatttccgaagagatgaacccacgccggtaatggttctagaattttcccctaatgtgcgttaaattaggcccatgagctcactttgggggctctacatcttgtaattaggaaccctcgagacaaggtttctcgagacagggattctctgtgtagccctggctgtcctggaactcactctgtagaccaggctagcccgggtgctgggattaaaggcgtgcgccaaaattgtttttacatagccaatg

SEQ ID NO: 52426 - DNA, 273 bp, Mus musculus
  source 1..273: mol_type = other DNA
atatatacataattaaaaataattttttttttttttggtttttcactttgtaggctggcctcgagctcagaaaaaaataaatcttaaaaaataatttcttggactggggtcctatcatcaccaccgccgccgccgccgctaccatcgcagctgctgccactctagcccacggccagatctggaactcatgcagcctgaaaaggaatttctatccagaaaacgagcggcaagtggtccatttccttgaagagctcaatttaaatcgcccggtca

SEQ ID NO: 52427 - DNA, 269 bp, Mus musculus
  source 1..269: mol_type = other DNA
gtaggcagaatattcttttgactgttctcataggtcaaaggttcagaatcgtgacttttataatcataaaatcttacccttagaaatgcttaaggacagtgcagcgctgagatttcaggagtgagccaccacacctggctgattcaagcgtttgtttcagacagatctagtggcacatgctgacctctgggtcccggagtaatagcagagggcggtgcccacgaccctagtgggagagtggcggcgccgcgggaggtgtcggccgaggg

SEQ ID NO: 52428 - DNA, 278 bp, Mus musculus
  source 1..278: mol_type = other DNA
tctccaaaagtaggtgtaatatcttcctttgtttggacctaaaaggtcctgtagacatgacttcattccagtgcccggctgagcccgggtggaggagcatcccgggtttaacctcttggaatgcttgatccggaccacgcagaccctgcagggacaatcgggtatcctagattccgggatggacttaagtttaaaggccgacttgaattttgtgagattaaaaaaacaaaaaactccggagatggcctgaaggcaaagccaacagccagaggtctgac

SEQ ID NO: 52429 - DNA, 355 bp, Mus musculus
  source 1..355: mol_type = other DNA
tggagggcagaggcagtgcctccaaagtaccagaattttaaacgtgtactactgggtttctctgtgtagccctggctgtcctggaactcactttgtagaccaggctggcctcgaaaaggcgtgcgcagagtaaacccttgacttttagggatttgctgctacaactgtaataatgaaatggaattaccactttccgactaaagaaaggtgagcatgagagcatttattgaaaaaaatttttcccatctgagacctcgaagagccagaagcctctatgggcttaaaaaaaacttaaaactttggttggtttccagttcctgaagaggaaatacgatgtcataacccattacctcat

SEQ ID NO: 52430 - DNA, 209 bp, Mus musculus
  source 1..209: mol_type = other DNA
aaaaacttaaaactttggttggtttccagttcctgaagaggaaatacgatgtcataacccattacctcattataaatctcaggtttataaaagctctagcagatctggcagctagaagaggggctccggctactcagagcaggccttgaccggcgcttttccgggggattctgtgaatagacgcgatcccccatacttttaagggcacc

SEQ ID NO: 52431 - DNA, 242 bp, Mus musculus
  source 1..242: mol_type = other DNA
aggcaggctagcctacattctggatataaatgacattcactaccagtggtacttgctgcgagtggcaaaacattctgttaaatataaaccccatcttcaggatgaggataattataacgtctaccttacagggtagttgtgaggacgcatgcccaggcacagcaggtgctgggggggcgcgccgacaccgcggcctcccctttaagaggcgccaccgcccacggaccgccgctgcggcaggg

SEQ ID NO: 52432 - DNA, 458 bp, Mus musculus
  source 1..458: mol_type = other DNA
ctgggttcagttcccacataagtctgacctaaatctccctagatagatcaggttagcggttaagaatatgtgtcacacctggctaactaagatgttaaaagtacactgtttgttggtctttggccaatggaaatcaccataatcatatccaatggatgttaagcattggtcaaagtgttccatgcggtggatacttcctaacgtatcctaacatacctgttttaggataaatgactcttattggggttagtggggagaggaagatgaaggacccgcccacctccccgccccccagtggaaattgcaattcccctcccgatcgcagggggcactgcaggccccggggaggttgggggctgagagctgctgcccagctccggagcgctgggggcgctgtgtgcagccctggttgagcctccgctcccggccacggggggcgctgcgcggcgccggtggtt

SEQ ID NO: 52433 - DNA, 616 bp, Mus musculus
  source 1..616: mol_type = other DNA
gggttccgcaatccaggtccccaaaggtgggatcctctgggtggtgcattggaagccccaggctctaagactgctagctcctcagttttcccggtgacacctggaaagtgaccctgccattagtagaggctcaggtcagggccccgcctctcctgggcggcctctgccctagcccggcaggctcgctcccacggtccccgaggtgggcgggtgagcccaggacccggcctgactcgccctcgcccccgcgccgggcctgggcttccctagcccagctcgcacccgggggccgtcggagccgccgcgcgcccagctctacgcgcctggcgccctccccacgcgggcgtccccgactcccgcgcgcgctcaggctcccagttgggaaccaaggagggggaggacagaccttatttgggcagcgccttatatggagtggcccaatatggccctgccgcttccggctctgggaggaggggcgagcgggggaactccaggcgcctggcccgggaggccactgctagcgtggaggtgcccaccactcttggatgggagggcttcacgtcactccggtcctcccgcatatatggccatgtacgtcacggcggaggcgggcccg

SEQ ID NO: 52434 - DNA, 447 bp, Mus musculus
  source 1..447: mol_type = other DNA
ttacaagcgattataaactcaactaggctgtgaactccattactttgttcaagtttagtcctagaaaaacaagatctagtacttgcttcgaggtcaaaatatttgaaaagcttaactcataaagtaaaagttctaacgctcatgctctcagaaaccttgggtctctgatcagttcctgatctcgacctagcggtcaagattctgaacttttcctcgttggcgcagaacgaaagacaacgaccacgcactctctctctctcctcagcccgcttcctcctcctggagagccgggccggaaggaagaccgtccctcccgctccccagggcagccaggccgccgaggcagccaatcagattgcctcttgtagcggaggcgcagagagccaatgggaagtcgcggcgcgcgcagagcctctcgtcgtcgccccgccgccttccactccgccc

SEQ ID NO: 52435 - DNA, 405 bp, Mus musculus
  source 1..405: mol_type = other DNA
aattccagcgttctagaagtacacgtgacagccggcgcccgttgtctttgaaaaaaaaacaaatttgtgtgagaccgcgcacattcaggtgtgcacgcaagtcgcggcctccggggacaacgcccacgcgcctgccagtgagcgcgcgagctcgcgcccccggcactcgcccgcaaattcgcgtgcactggagcatacgacctctgtccggagcggagaacgcaggcgcagaacgcacctcccccgtcctaaggaccgggactgtccgaagctgctcccacagccctggaaaccgtgatgagagaagtgctggcggcgtgcgccgatcccgggagcagcggacacaggcagcacgtcgggcgcctcagcagaagagcgggcttcattgctgcagcggccagcccc

SEQ ID NO: 52436 - DNA, 609 bp, Mus musculus
  source 1..609: mol_type = other DNA
tgctccctctttttaagaggccctaaaagaccgggtataatggtgcagacctataatcgcagcagttggcacttgagtaaattcaattcccacacaaaagaatggctgtaataataaaaaagtttttaggtcattcttgctcccaggtcctgaggatcccgttctactgtaccgggagaagtagaacttgcacttgctgtgtttctcgttcggtaaagcaaagcagaaggctgccccttttctggccgccttggactagggtacagggtgcctggccccagcaggacccggcgtggccgcgcgggtccccgggagccggacggggcggggccttccggggcagcgccctgagactcacctgagctgggagcggtgactcacctgccctccgcccgtgggttcgggtctgcgtgcccggaggccaaaccaaaaggacttctgggggtcccggcctggagttgccaggctaccttccgggtgggaggctctccctagaaagcgccggctgcgccaggccgggaccggcggtatggaggccgcgggtgccgggaagggcgggcgcggcgcggggcgggccgggggcgggggcgcagggcggcccatttcctc

SEQ ID NO: 52437 - DNA, 481 bp, Mus musculus
  source 1..481: mol_type = other DNA
ttaatgtcctttcatattcatgagaattcaacaagagctgaatgctattttgatgttaccccaatctcaacagtaactgtgggactgtcaaaatccaggcacactgcaatacttgtccagaattgtctctgtcccatccaatcagtgtggtaataaagcattgttatataataaggaaaaaaagccaaaattgtttcttttggaagctattcatctttgttgtataatgttaagttcttaatgacaaagtaactaagcccactgagtttaccaacacagtcagtcactttgctttttaccaagcatgacaacaaggcaatgtgcccatttagatgatcgaatgcagcatttattacaacctcattgttgcttcctacactgaaggaataccaaattctcaaatcaggagttcttctttacactgttacaaagcacagtgcttttaacaggtgacgtcagcctatatacagtgctgtgtggt

SEQ ID NO: 52438 - DNA, 499 bp, Mus musculus
  source 1..499: mol_type = other DNA
aaacaaaccaaggtggctggcttgtgaagattgctataagtggaccactcacagagatctgcctgcttctgtcctgagagtaaaggcatatgctctcataacttgttctaatttttttttttaattcaagaaataaaacctgtttgccatttagtatcaagagccatcttttgcttctttacatttcactttttacttaaattttgaatgtgtaacatacgtgtgtctgtttgtacatgtacatataacagctttcatgggaacctacctgtgcttaccagttaggctaggctggctggtcataaagacccagaagattgtatgcaagcactgtatatacttagctatcagcagctttgttctgaaagcatctagttactttgtgcactagaagaactggtaattggagatgggatctcactatgaattcgatcacattttaggtgaagtcacatataaacactcccattgtatgttttccaactttgaattaaaaatt

SEQ ID NO: 52439 - DNA, 365 bp, Mus musculus
  source 1..365: mol_type = other DNA
tgtcaacttgacctatcatccctaggatggtgggaaggacagtaagtggcattcctgactgtaacctgtaagttaaacttttctcatagcaatgcaaagcaaaacattctctgtgagaacatcgtctttgtaagaaaagaggactcaggtgtcctatttatcgttcaaataatttatcatttaaaaaacatactcaaaacacaattatataaatagtgactacttacaggtactcaatgtgtgtcacaaactgagtttctgaagatctttacactagaaagaaattacggtcttgggaaattaaacatagctatttttagatacagctcccagcggagggacatgaacaaaacgcgccttcagcc

SEQ ID NO: 52440 - DNA, 190 bp, Mus musculus
  source 1..190: mol_type = other DNA
ccaggaattgcgattgtgggccttgctcttatgggccctgggcgctagctgtgtcactgaagcagcccaaatctagagaaagccagtcttagctgctgccactcagttaagggttttcaatgaaggacgtcaaggctgtgtatgcgggcgggactcatcgctccgccctgcaaccgccccagggcggggc

SEQ ID NO: 52441 - DNA, 288 bp, Mus musculus
  source 1..288: mol_type = other DNA
tctggctcctttaagcgtttccggagccccagacaaggaccgagaaaggtttcaacacgtgtccgggagaaccagatctgcttcagcctaccttcaattactattcgaagtgttaacttttattgtctttaaaaatttactaaagtgtcatttttaaaagtggttctcttgcagtcttactgttttggcttcctacaagttaagattacaggaatcagccaccagagcagtgcactgtggtccaatctacctgatctttgactcagcccaacatggccagctgccagt

SEQ ID NO: 52442 - DNA, 260 bp, Mus musculus
  source 1..260: mol_type = other DNA
agagcagtcagtgctcttaacccttagaataaagtcactaactaaaccttatttctaaactcagtctctcagggaagatgtttacaaggactcagttgagcacaagagtcatttctctgttttcaactgggaaactaagttcactcatggagttactgtagaattttagtgtttttgtttgaaagtagcataaaatatttttgccattccaaccgaggaataatttataggaatggagtctaagcttagtcccctgctcc

SEQ ID NO: 52443 - DNA, 383 bp, Mus musculus
  source 1..383: mol_type = other DNA
catgtggcaacaacttgtctcctagtttctccttcagtctcctgagcagaaaaattcaggcacatgcccctatttcttgtaatgttccctctattcacagtggaagcagaaatgtttactatatctggtgatgtgtaagtagcattgcctatataggaagagctcgagaacaaacaactaaaactttagtttcttctggcataatttgcagccttatgtagatgttgagatgcaaagcatctttttcccgccttcgcctgaagggggatccttcctgggcctgggagaacaacgctggccggccgcgtacgtcacgtgcctaccccgcgcggggggaggggcttggcgcgtctctcgcgagatgccacctcctgccagcgccg

SEQ ID NO: 52444 - DNA, 341 bp, Mus musculus
  source 1..341: mol_type = other DNA
aaattttatttctaagttcatatttctagcatcagaggaaagacatttaatggggttcatatgttctcttaaaaatatacccagataatttttcaacatggatcttagaactaaccagttatcagatctactttaatgtcctaggagtggaagtcgcactgcaagctcctttggacaagatctcttgtcacaaaagataatccttttttgcttatgtcaggatctcaatatgacattaagtaccttttggtgtatatacttgaagacagatacgtcagtctggtggggctggcaattggcctagctgggaagcaagacggaagtgaagtcacttccgggca

SEQ ID NO: 52445 - DNA, 508 bp, Mus musculus
  source 1..508: mol_type = other DNA
atgttatagcctcgaacattaaatgaacatactgaccaaaattgttctccttaccttataagagtaggtatcgatttgggcagaaatccttaaatttgtaggaaattacttattttgttacttgatcttagatcttacatcagatgcttgtaaagcagaaaacttcagcatcgtatgatagtatatttttattcttctaaaagaagaagcccatcaatggatttaaatgtttttaagctcaatttgaaattccctttgttaaatttcagcatgaaaagctactttttaaatatctatatgcaggctctgcatatattcagaatctgtttaagatatgtaatgaattccttgtaagtttgagatcttaagtggttttttttaaatcaacatgatgcataattttttttctttaaaaaaatacagcatctactaaagggatttatgactaaaactgcttatgaagaagattctacatttttgaagcaaagttaacctagctttctagcta

SEQ ID NO: 52446 - DNA, 368 bp, Mus musculus
  source 1..368: mol_type = other DNA
gtatatgtataattatcttatagtgctcttacaaaaggactaatgaaaatagttttctcttgtgaattttgttttgatttgagacaaggtcttattgcatatcccaaactccttgagtaatatttattttatttaacaccaccacatggtttctggtgtgtctgaagacagctacagtgtactcacatacattaaatgaataaataaaaataagatctgatgctctcttctggtgcatctgaagacagcaacagtgtacttaggtataataataaataaatcttttttttaaaaagtgcaattaatgaaacagaagataattctatttgaattttagtgacaattcttaagagagcttagaaagacaa

SEQ ID NO: 52447 - DNA, 265 bp, Mus musculus
  source 1..265: mol_type = other DNA
cagctctcgtcctccggtccaggtcaagcacctgggatccgcctgccccagacaacaaaagtcttaatgtttttgcaacaagatgcctgtctgtggatacctcaggaaccaacctgaatttaaccttggtttatcactactaagtctttttctttcagcagtgaaagagttaacatatgcaatcccagagggtccatgtgacagtgcatatatcttccggagagcgggggatgagtcatgtcctctccctctcctgcctttacca

SEQ ID NO: 52448 - DNA, 400 bp, Mus musculus
  source 1..400: mol_type = other DNA
taatttcctttttaaaacaaaacaagacaaaatttaaaaaaaatcacttataccttgcatgatggtatacaccgtttttgagttcaaggacagtcgtctcaaaaagtcaagtaaataacatttaaaatatttatttttattttatgagtgtttacctgcatgtatgtatgtgtaccactgcttgctggaaatcccctggaattggagagcaaaccaagcaattgttcctaacaactggctctggcctagggaaagggcaccgaccacgtatgctctcatacagccatgaccacagtcctcctggagactgtgacctgtgggcactgggaccactttcaacatggcttctccagctggaggagagccaggtcccctgcatgcgtggcgtctccagggcctc

SEQ ID NO: 52449 - DNA, 374 bp, Mus musculus
  source 1..374: mol_type = other DNA
ccctgggctcagcatagagggcaaggtatgccagccatgccccgtaacaggcagggactgagggctgctgcaacataatcttataggccaggtctgggaagagagcagcgtgctgcccagcctctgcagctggatgcaggtattgaataaacacctgcatctggcagggctgtacatttgaaaactttaccagggactagatcccaccctcaggggtctaaatttaaatttctctgtggaccaggctggccttaaaccacaagcccggctctcaaggggcgtggagccgggcctcggccttgcgaacagaggaagtccccgccccggttgccagggtgctctgtggcgtcgcattctcattggccggcgacgga

SEQ ID NO: 52450 - DNA, 302 bp, Mus musculus
  source 1..302: mol_type = other DNA
cagcctgttcaagttgctcaagcagatcagtaagccagaagttaaggacagttctgtcctattgtctgtcataagacaaagacagctggtgactgcttctctaccctacaaagctgaggatatggacgatcctcacgctctgaacccctgtcggccggagtccggagccccacctccacgctgcaagttcggcatgggggcttcacccctaaaagcccacagctggcgttgacgctggcgctttaagacgctttgaccccgcggcatccaggcggggcggggatagtgcaggagccaccagc

SEQ ID NO: 52451 - DNA, 289 bp, Mus musculus
  source 1..289: mol_type = other DNA
tgtgtgtgtgtgtgtgtgcgcgcgcgcgcgcgtgctcaagcatgcacgggtgcttgtgcatgtgtctgtacaagaacctgggggccatgagccccaggattcacctgactctgcctccccctgtaatgggatttcaggtcagcccacctatcaggaataacgagcttgcttgtaaggcctccctaacagagtcccatctgcactgaagggctgcagggaaggacctgaagggtccctccactggtcatctcatctgggctgtgtgctgaaccggggcccctggagccct

SEQ ID NO: 52452 - DNA, 315 bp, Mus musculus
  source 1..315: mol_type = other DNA
cctcagatcgctttgattctttgcttgactccaaggaaaacagggagggactgtaggaataagccctcctttcctctttccaaacttcttagaaaagaagacaggatggttcctctgatgcctgaggggcttcaatgggaggaactttttctatgtccaggtcttagcatagtttatcaggaaggacagaactcactatcctcagctcagatgagtctgagtccaaactctccgtaccccggcggctcagagtgagtcgcgcgggccccgccgggacttgtagtcgcgtagaagcgcagcctaccgtgccccgcg

SEQ ID NO: 52453 - DNA, 187 bp, Mus musculus
  source 1..187: mol_type = other DNA
ggccagatggctggggagaatgacttgggaaaggaagaaactattaaattccttgctcagatttcaggaagtaaagtgtgtccgggggagaggagggcgatctgaagcttcacctcccccaccctcccggccagatggctagcttcctcccagagcactgaaaactgtgctctggcaagggccaggg

SEQ ID NO: 52454 - DNA, 399 bp, Mus musculus
  source 1..399: mol_type = other DNA
atggcttaacaagtgaagttaggtactgtacttactgtactatgtaagccagagtctgatcctcagaattatgcttacacaatgaaaaatcaaatttttaacatttaaaataagaataaatttagaaaactaatttagttctcttttttttaaagattgtatttttaatttaagtatatgagtacactgtcatgtcttcagacacaccaccaccatgtggttgaagagcagtcagtgttcttaactgctgagccatagcccactaatttagtccttaatattttagaaataaatgtgtcagaggcattatagtccatctattctgtagaatatgtgatctacactctgtagtgcttgaactattacgtagaacagcaacttgggctcctaagtcccgga

SEQ ID NO: 52455 - DNA, 343 bp, Mus musculus
  source 1..343: mol_type = other DNA
aatcactcagattcctacctctgcagtttaagataattgttttttaaaaatccagaggttttccaggaagccagaatattcctgggagttcaggggagcctctgaacaggttcttgcctggaagggacgaactgctcctgtcccgggcctcagcagctagcttctcctgtgccagggaaacgagccaactggcttctgagcttctgagcctcagggctcaggctttacaacctcaccgacttgggtaaagttactgtacctctggccagatggctggggagaatgacttgggaaaggaagaaactattaaattccttgctcagatttcaggaagtaaagtgtg

SEQ ID NO: 52456 - DNA, 492 bp, Mus musculus
  source 1..492: mol_type = other DNA
agctgtgcatttgagaaaataaaactttattgaatcaaaaagaacaaaattaaaaatctgacctgaaggcatttttgtgttttctttcatatttcagaaagacacaggccctctaacatacagattctctgtgactggcagacccttctctgtaaggagaggtgatcaaccagcagcctcagggctcccagtgcaagcaagctctggaaaagtccctttctttttcatggaaagtgacggttgatcttcgaagacccagtcacgcagggtaccagaggctgctctcaggcctccgcgcctgaactctcgcgagatttcccgcgacgtcatcccctctgcggctgtgcttgcgccggcgcctgcgccggcgcgtagggtgctcgcaggggcggcccgtatccctccgccgctggcgcggcccggccctccctccctggcctgcccctcggcctgggcccaccctgcgctccggcggccccaccccggcggcgc

SEQ ID NO: 52457 - DNA, 566 bp, Mus musculus
  source 1..566: mol_type = other DNA
ttaaaaatctgacctgaaggcatttttgtgttttctttcatatttcagaaagacacaggccctctaacatacagattctctgtgactggcagacccttctctgtaaggagaggtgatcaaccagcagcctcagggctcccagtgcaagcaagctctggaaaagtccctttctttttcatggaaagtgacggttgatcttcgaagacccagtcacgcagggtaccagaggctgctctcaggcctccgcgcctgaactctcgcgagatttcccgcgacgtcatcccctctgcggctgtgcttgcgccggcgcctgcgccggcgcgtagggtgctcgcaggggcggcccgtatccctccgccgctggcgcggcccggccctccctccctggcctgcccctcggcctgggcccaccctgcgctccggcggccccaccccggcggcgccgcccgcccgcgcgtccgagcaggctccccccggctccgccaccgtaaggcgctgggcgagcccggagcttgggggctcttcctcccaggcggagggatccacggcggccgaggaggcggcgc

SEQ ID NO: 52458 - DNA, 307 bp, Mus musculus
  source 1..307: mol_type = other DNA
ggagctgagatttagttcttagctagttatctacgattatagttgggtaggagcctgcctcctaaaaaactcaaatctgatgggagcaggactctgcctcctttttctggcagatcgcagcggggtgagggctgagctgccaaaccttcccttatgtatttgtaaaggctcagcctgggaggacctcgccaggacgctcttgaggcgcaacggctgcgactccagcttcagagcctgcggcgtccaagtggccccggtccgggttttgccggcagcccccgggcagcgttcggagctcctgcccggg

SEQ ID NO: 52459 - DNA, 417 bp, Mus musculus
  source 1..417: mol_type = other DNA
cagaggctctgtggtagcacctgactgtcctcagactccagagtctgaaaccctgtagtgtctctcatctctatagatttacacccaagaagtcctcaaacttcttccaggaagctgggtggcctggactccagggtgagatctcccaggatgggaatggggattctggggtggggacaagccccatccctccttcacctggagaatggcctggtcctaggaggggggcggaacctcgtggaactcccctcccccactttggtccagcttatgctgaagccggtggccgtgttctggtgggtgggcgccccgcacaaggtcgggcgcttgtgcccaggcgccgcgggtgggccctcctggtggccacggtcccctccaggctgcgggcgcgccggcagtctctcccccgcccccctc

SEQ ID NO: 52460 - DNA, 507 bp, Mus musculus
  source 1..507: mol_type = other DNA
aaagaaaccatttccatggagtcaagctggctcccaagagcgccccccccctttagggagttggttttttaaagacaagactcattgtctccttttaaaatgatgggactgggatccagctcaagaagaggcaagaagcaggcgcatagcctagggcttagggcagagagaggcacgccctgtgtcctactcgggtggcacgatttctcccgcgcccctgcgggctgaaggcgggcaagcttcccctgcagaagccacgctccgggcgggcgtcccatcctccgcatcctcctccaagtcctggcgcacagggagggagcgctgcgctgcgcccgggctgcgcatcgcggcccacttgccgcctgtcccctgccctggctgggccacctccccgggctgccggtggagggctctgtttcccctcccaaggcggcggcggctgagcggcggagccccccaaatggcctggccagatgcggcaggtttgctgctcagcgctgccgccgc

SEQ ID NO: 52461 - DNA, 688 bp, Mus musculus
  source 1..688: mol_type = other DNA
cttctcttggagatctatttaaataaaggtgaaagcagttaccaggtcactagtttatctatgttaattcagtgtagtgttcactgagatgttacagcatgcatgacagtaactgtatcttaaagttggtaagatttcacaaacactcttaaaggacattgtatagtcacgcataaataatatttatcagggttacactgcgtgggaggctgggcagaaaccccgcacttcctgtcaatggttcctctcggcgggcgtctcaaggccaaggtgagaccctccccggagatgaaaggctcgctgcctctgagccaggcggagggagggggcgtgtgacgaggtggcagcggcagccgcagtgacgcggaggccctggcgcaggcccctcatgctcccacccgggccgcagcccagcctgggcctcgcgaacggcggcaagggatgagccccctaggggcgccccgggagcggggtggggagagtgggccaccggggcccagtcctcggacgcgccccggggcctgggctgcggtgttgacgcgccaacggcagcgagggcgcgttcccgcgtgtgaggcagcaacgaggagcgcgctccgctaccgcggcggccacggagccgcgagcgcgagccacggagggggtgggcagcgcggggcgcgcgctgacgtcgccgggagtcacgcac

SEQ ID NO: 52462 - DNA, 788 bp, Mus musculus
  source 1..788: mol_type = other DNA
acactgcgtgggaggctgggcagaaaccccgcacttcctgtcaatggttcctctcggcgggcgtctcaaggccaaggtgagaccctccccggagatgaaaggctcgctgcctctgagccaggcggagggagggggcgtgtgacgaggtggcagcggcagccgcagtgacgcggaggccctggcgcaggcccctcatgctcccacccgggccgcagcccagcctgggcctcgcgaacggcggcaagggatgagccccctaggggcgccccgggagcggggtggggagagtgggccaccggggcccagtcctcggacgcgccccggggcctgggctgcggtgttgacgcgccaacggcagcgagggcgcgttcccgcgtgtgaggcagcaacgaggagcgcgctccgctaccgcggcggccacggagccgcgagcgcgagccacggagggggtgggcagcgcggggcgcgcgctgacgtcgccgggagtcacgcacggagcgccgggttacgcgccgacgtctggctgccacgactcgccgtggcggcggcgagcggatcccggagcggggtgtcagcccggccggcccgcgggagtgaaaggcagagcgaacgaggccccgagcccgccgcgcggccgccgcctccgcctcctcccctcccctcgcgcgcggcccgcccccgcccgcagcccgccctcctcgcggctcagcccgcagagcccgagcgaggcgccgttcggctcgcgcgccgtccagaacaggtgtgcgcgcgcctccccgcgcccgcct

SEQ ID NO: 52463 - DNA, 271 bp, Mus musculus
  source 1..271: mol_type = other DNA
cttggcaggtttagggaatcagtctagatctgcacattttcaggcagcagcagcagcagcagccctacctccggtcctagcgacgtggggccgggtgctcgcaaggacccaggagggggcgggctcgcgctatgacaccgccctcgcttggtgccgccccctcgcgcgttgccagggagaaggtgactccgggcttccagcgcaggaggctcgggtgacgtcaggcgcgccgctgcggctcagtggctcgcgacaggtgcggcgctgttgg

SEQ ID NO: 52464 - DNA, 238 bp, Mus musculus
  source 1..238: mol_type = other DNA
gatgagtatatacgtcctaattttcatttaaaatttgaatgtatttagtgactgtgtgttcataagcaagtgtggggatacacacattttcaacaaacatatgcgacttgtcttgagaagcaaaattaagtttttggttgaaccggcatgcctgaagctgggggctttatacatccctaacagacagggactgaatgaaggcctcaattctgcagcccaaatggtttatcaagtataa

SEQ ID NO: 52465 - DNA, 123 bp, Mus musculus
  source 1..123: mol_type = other DNA
aggccagcctgaaaagattttgagttaaagctttaagataggccctaggttatattgttgataaccaaactggattcgtggtgttaatattctgtttacgcaaaacatagaatggattccgct

SEQ ID NO: 52466 - DNA, 350 bp, Mus musculus
  source 1..350: mol_type = other DNA
cagtgtataaatagtaggcctgtttttatccctcaggcaaagtgctgaaatacttactgagggagtcattatttgagtcaggacacgcatagttcagaaatcaaagtggaagccacttcaaatacctcaagagacaagctggcattcctgtttctagtttctaaacgataaacgaattgttatttactgcttggttaccgccggcgtatcccgccgcgaccgcctagtccgggacagcgctgtcggcgcctccagccgggctggcttcccggcgcgggagggggagggaagggggcggtgccgggcggggcggggctcccactccttccccggagccttattcccggccg

SEQ ID NO: 52467 - DNA, 470 bp, Mus musculus
  source 1..470: mol_type = other DNA
cctgccccaaggctgtagagcgcgccggtccagcaccaggcgcgcgggcgggtggagaagcctcagagacgccatcggagctgctcccggggttgcttaagctccgcgcgctgcgctctgcccggacaggcgggaggcgccaatgattacgtcgaggtctgccaaccaggatggaagagagggcttcgcgacggattgcttctttccgcccccgtgcggctacttccggccatagccgcggcgcctgtggacgcctcttgcatcttggacgcacaagactctccaaccccagcccttttcccgtcacctcagatgggggcgggaattgtaccacgcgacgtcttttgactgaccgccaggccagcgagggcgttcacaaccgcctaggcctacgcgggtcaacgcagcttgggggctgcgagccagctagcaccctgcggccaatgatttgcaggcgcctggaagtcgca

SEQ ID NO: 52468 - DNA, 444 bp, Mus musculus
  source 1..444: mol_type = other DNA
tctcattagtccagttggtagaactagtatactcgaggcacctgaggcttcaagtttgcttctctttgattcttggcagatattaaatgaatagaagctttattttcatattcatattattatatatctatacctaatatactgttttatttgtgttaacagttcacataaaataaaaaaaataaattatttttaaaaataccgtacatagaaaataaactcagaacagtatttagtgtgtggctttctaaaacttttatctgatatttttattttattagcatacattgtacacaacagtgaatttaatgataacattttcacactcaaatataatgtattttgatcatttagttaagtttgcttacaggagcttacgtgagattatttatgcctctaggtcctcagggagagatagggccttctgaggccctaccccttccg

SEQ ID NO: 52469 - DNA, 426 bp, Mus musculus
  source 1..426: mol_type = other DNA
ttctcagtttgcttaaaagtgaaattatcagacaataatccagtctgctcagacatgtgtcacttgagacgcagcttctgcattagcaggaattgcctgtcaaatcgttaaatatttttttttaaatgcttggtggtgcatgcctttaagactagcactcaggtagaagtgtctaaaaattaatactctaaataaataaaatctagtctctgagctctctttgatgttcctttctagagagcttaacagctaagccttccttgctaagccctcagcctgctatgctcaagggcaggccatcaggaccttgaccaaatttggtaccagaatagtttcatcataaaacgtggttaatagtactacattactcctcccaacctagaacagggtggagccctcaagttgactggccagtggcctgccccg

SEQ ID NO: 52470 - DNA, 389 bp, Mus musculus
  source 1..389: mol_type = other DNA
ctcactagtggcctatcataattaaggcatggttcataatggaagtctgattccattcattcagcaaacagttatttatatgagtacactgtagctgtcttcagacacacaccagaagagtgcatgatggttgtgagccaccatgtggtctaagagcttttctatatcagatattaaagtacttctgagactttcactatgaactcagatgatactggcatttcagaagacttctgaagagttgacatatcgagaaaaatgaatgtaaagatgcattcatttcagggcagtctactgatgtgaccactgtgttaaacaaggagacatttagaaaatatgttgaacgggggagggggctgggctctctaggcagctcctcctatacgcgc

SEQ ID NO: 52471 - DNA, 289 bp, Mus musculus
  source 1..289: mol_type = other DNA
atccagctgcattcctcctaaatggagcagagactagtcagtgtagcagcaggctactactcatgcacctggtagctcccaggttgggcgctgccactgagtgctatagcacatgcaaagatcaagcaccacccggtgtttgaacctcgggttgaccagaatgatggccagcatataatccttgcccagcatagcctctgctggcctgtgctctcacctccggagctgcaggggccacaagcccagcctctctgcgccggagaccgccggcccggccaactggcatgct

SEQ ID NO: 52472 - DNA, 182 bp, Mus musculus
  source 1..182: mol_type = other DNA
ctctttctataaaaccttccaggaacttccattttagctttatgtaggaagtacacaagctagctgaaaacagtcatttatcttctacacttgctgtgttccaatacctgagaaactggcttgatatatgcagaagggtaaccctgacaagagttatccctgacgtctctgttctttaaggc

SEQ ID NO: 52473 - DNA, 353 bp, Mus musculus
  source 1..353: mol_type = other DNA
tagcacatgcaaagatcaagcaccacccggtgtttgaacctcgggttgaccagaatgatggccagcatataatccttgcccagcatagcctctgctggcctgtgctctcacctccggagctgcaggggccacaagcccagcctctctgcgccggagaccgccggcccggccaactggcatgctgcgtactgacactacgaagttagtaactatgagttcctcggacggcggaagccgggcgaggagatcctgcacacggtgcaccagggggcgaatgagatcatcgcgtggagcatgagatcatcacgttccgacctttacccgtgcgcgcacacggcggttgctgccttaaa

SEQ ID NO: 52474 - DNA, 407 bp, Mus musculus
  source 1..407: mol_type = other DNA
caaaccttgcttcccaattttaggaacactgtgtaatgtgatttggccaatgtaccactatcaaataccacattttgctttgttttgttatttaaacaagtttttgcaggccaggctggccctgaactcaagctggcctaattgctagaattaaagtcatttcctattagcctaacaagctttttatagaaaagtattgaaaaaatcatgcgtttcaggctaggctagattgggtggagaattatttttcatattaactctcaactttgagcttatctatagataagttcacaatctttccacaaatgtccaattacattcaaagaaaatcaagagctgattcacccttttcctgtacgcaccagacaagtccggggcgcatcttcgttgcaatatttactagaaga

SEQ ID NO: 52475 - DNA, 446 bp, Mus musculus
  source 1..446: mol_type = other DNA
tcaaaaactgctttttgtgaattctaggctagcttggtctacatagtgagttccagaatatccagggctatatagtgaacaaaccttgcttcccaattttaggaacactgtgtaatgtgatttggccaatgtaccactatcaaataccacattttgctttgttttgttatttaaacaagtttttgcaggccaggctggccctgaactcaagctggcctaattgctagaattaaagtcatttcctattagcctaacaagctttttatagaaaagtattgaaaaaatcatgcgtttcaggctaggctagattgggtggagaattatttttcatattaactctcaactttgagcttatctatagataagttcacaatctttccacaaatgtccaattacattcaaagaaaatcaagagctgattcacccttttcctgtacgcaccagac

SEQ ID NO: 52476 - DNA, 420 bp, Mus musculus
  source 1..420: mol_type = other DNA
gtgctttaaatcaggcttgcaagctcacttggagactccagcatgctggacttctgcagaataaaacactctttgcgattctttggcaaatcatgggcccttatctcagaggctgaaaatattctaggccaagattagatgatactgaggctagaagcttatcagacagataaaagttacttttataggattcttctctggctggcctagaactcggtaagtgagccaggtagtctcaaactctgaggaaccctggaccaagcccagaaagatttttatggtatgcctagtgtgcctgcatggcatcacatgcgtgcaggaactgaagggaaactggtcccagaatccttccggatgaaatattatgcttcaagcattagccgagtaatcagtgaattaatcagtgaattcttggagtga

SEQ ID NO: 52477 - DNA, 131 bp, Mus musculus
  source 1..131: mol_type = other DNA
acacattcagacaccttgagctgccctcagctggggcaaactcgacgagcctagcgtctctagtcccgcgggcaggaaagagtggtcgactcgagcccaatcgacggcgaagactggagggcccgctattg

SEQ ID NO: 52478 - DNA, 337 bp, Mus musculus
  source 1..337: mol_type = other DNA
tcagctttttaatatttacaaaagaaaagcaccaaataactctgtaagcatagaatttttacataaagtacacagttagaccatatatatatatatatatatatatatatatatatatatatatgttgccatgaataaaaagcatcacacaactaagtaaatgtgaattcccgggcccctgacctccggcgaccagtaagcttgggctgcacctccgagcattcgcggatcagaatgggcagctttggcgcaaccccagctttgcgccgaccgctcggctagcagcggcagccgccatctttcaatagcgggccctccagtcttcgccgtcgattgg

SEQ ID NO: 52479 - DNA, 344 bp, Mus musculus
  source 1..344: mol_type = other DNA
cttctcagcctgtcacagggactgccccacactgttattattgggacctttgataaaaggaatacccagaacatagctgtcatgcttgttttcctggtagcctaagtacaatttggtcatgagctaaactacaaatgttcactgtttaggtatcaccaagtcaggaataactcagattggtagtagagcaaacttttagattggagtttaatccgacactcgcgccgtgacgggctttgtgtttaaaacgtacttatacaccaacaagacaacgcttcatttaaagaaacaaaagggtatgctttgttgagtcgcatcagctgcggcaggcccgcctcttctga

SEQ ID NO: 52480 - DNA, 354 bp, Mus musculus
  source 1..354: mol_type = other DNA
ggagggcgtcagacgctggctggcccaggcctgtttgagacctgagcctcctataggactagcttatagcttaatctctggggtgcctaactgggcacatgtggaagatattcaaaccttcttccgcccctctccacctgctgagctgagcaaaccagtagaggaaaactgcatatgtacttaaacagtctgcatatttgccatcagtttttgtttttattattatgttatcagtaatcactggcaaaaaaaaaaaaaactctctgcctcctaaattcccttcctctggtcctgacactggtataaaaaggaggaagccttctctcctcccacccacggtcctaagtggggggt

SEQ ID NO: 52481 - DNA, 427 bp, Mus musculus
  source 1..427: mol_type = other DNA
aaatgtttctctgagcttcatgttacggtaaattcacctgatgggcataaacttgtatcgatattttccaaattctaatatgttcaagattgagaagaatctgctatatatccatagaggtcataaaactctcaacttctgagatttcctcttttagaggacctgggttcccacttctggcctaggcgggtctagactttcaggctaggaggctccaccgggaaggagccggctcagggcggctcacctggctatgacagccgcgggtgcacacagtgctgggaggtcgcaggagctggccgagcagcgcagcccaggccctgcgacgcagtggccccaggtggggcattgtgctgcaggacgccggctttctggcgatttctgtcggacggatggtgggaacctccgaacctaggctgagtccacc

SEQ ID NO: 52482 - DNA, 206 bp, Mus musculus
  source 1..206: mol_type = other DNA
tcttagtggaatgcaagcctcgaaacggcaggcatccagtatggtgtattcagtattgtggatcagggcctctctctgaggcctcattcctccgatctgtggaggagtgtaccagctcctccagagcagcacgatctgccatcctgcctgccagcaggaactgacggctgtctaaaacccgccttggtggactcagcctaggttcg

SEQ ID NO: 52483 - DNA, 407 bp, Mus musculus
  source 1..407: mol_type = other DNA
ataatagacatttgccatcatgctggctcaaggtcactttcagctatatagcaagttctgggcctgagtgacaaaaatgattcttgtaggaatcataggaaagctctccaagacttaagttttgtttttgacatgctgtatccaatacagttagttaaatgaaaagaacatcctatattgtgtctgagtgaattcacactgaaaattttgagcaaattagttgatttcagtatgtaaaaggcatattgacattatatagtgacaggatacatatgaatatacatctgggagacctcttttttccaagcagtttacactttgcaaagcttcgcgctctgctcccgggagaggctggagtccacgcaggcgctgtggtggtctgtcatctcagaactttcaaaacatcc

SEQ ID NO: 52484 - DNA, 421 bp, Mus musculus
  source 1..421: mol_type = other DNA
ttcaggccaaaactgaatattttaaagactaaaagtgactgtagatgccccattcaccaaaaaaaattagtgctactttttggttaaactcattttgatgtcgaacatctaaactcatttcatttatacagtacaatttaatcttgaaaacagcattcgccactctaacgagtgcttagtttgctaggcaggaaattgcctagcagggaacctagctcatgtacctctaggaccacatgaaccggtcgtggtggtacattatatatagatcatggagcactattttcaaaactctgattctttgcataatagaagagatgagctattcttctgggcttgtttttaaagccagagagaaaatgcgcctgcgccatctccctggagcagagggcggggcccagaatgagaggctcggatctta

SEQ ID NO: 52485 - DNA, 643 bp, Mus musculus
  source 1..643: mol_type = other DNA
aaatatgaaaattagggccacatgtgactaatatagtcataaatctctggcaaagaaatctacctctccaactttagagacatgctgtaaaagagaagtttctaataaagaaatttaaaaatgttatcaaagacagttacagactgtccaggctgtccaaaaataggatacaggagagactgactcttgaactagtaggcaaactgacaaacctatttgggttagaaaaatggcgtgcagctggatgatcaacatatagatgagtcccttggagttctcctgtatttaacattaaaactaaatctggaaaacggattgagaagaatcagtaaaatcattcagccaaagcctattatagtgattgctttaagactgacaatccctgatagggaaaggtgatttctcagtattgacttaaaataatagtaaaaagttatcattgacaagctctcccacaaagaatgtttagtagtcagattttatgtcaaaattttatacaacagtcatttgtaataatttaccattatgtgaatgacatcttgctgtctgattcagatgcagacaccttaggaaaaatgtttgaaaaaaaaaaaccacacagtgactattatattaattatctggagagacaaattacaaactc

SEQ ID NO: 52486 - DNA, 682 bp, Mus musculus
  source 1..682: mol_type = other DNA
gcaaaaattttatcttacacaaagttacaagtgtgcaactttatttgagcttcatatttttacatatgaagaagccaactaaaaattaataaagatattcaagtaactaacactaaaaagaaatccgtttattcttcttgcatgataattcaaatataataatagataagagaatgattataaaataaaaacatattttatataagaaactaatgtaatctttaaagctcaaaattataaataacaaaggtgtatttaaacacatattcaataaacagaaatactcatagattctgttgtacttgaagaagcaataaaaattgtaatattacaagagatacttgtacatctgtgttggtatcatcactattatggatacacaaaatgctttgtatacacaatggaaccattaatcttttatggtttaacttacacggtagtgaaacttaaacaagagtaatggtggttaccatgtctaatctgtataaaatttaagcttcacaagaggataaatttgcaacatcgtgaatatatgtagcactattgaagttcacaatgcattaatgcatacgtttcatattgacagttaaatacggtaaagtcatatttacagttaataaggtaaaattctaaccagtttagctgtcgctgtctaccagagagtgatctctctcttggaaag

SEQ ID NO: 52487 - DNA, 632 bp, Mus musculus
  source 1..632: mol_type = other DNA
ggaaattcattgagttctctagattctcgaggcactgggttaaattcccagtgagtaagaaatcgaatgaatgagatctggcttatttataaaagcactagaaaagacagttatcaaggatacatgcttcagtaaaggacctggggtgatttacaaatgttctaaattaataaatgcaggtaagtttattgccacgtaagttgtaaattgccagaattatataaaacatatattagtacatatgcacacatttatcatatattttcatgcattgtcacaaatatcaaagacttatatttctattatatgtctggcatcttgaatagagatttcactgttaaagctcctttaaaattgtaaagtctgtatgtacttacaaacagtgaatcatattaaaattcatgttaaaaaactgttgtgaaaatttaattataatacaggaagttccattattagtaataatgccatgaagaaattgtaagattacgttttgataaaacaaaaactttggtaaaataagtacattaaatacttacacatttagcgttccttcaaagaagacaggatcctttccgtcattgtctcagataaaatggttaagaaactaaaaatatttaagaaattttggattg

SEQ ID NO: 52488 - DNA, 537 bp, Mus musculus
  source 1..537: mol_type = other DNA
ggattttgtatctttataaaattaaagtgttgagataccatatgtggctagtgatgcagtccagttgctacagtgcttgcctagtctgcaagaagcttggacacttgtggtggtgcatgcccacagtccagcacttttttggtacattccaagatagcctaggaaacagtaaacagtatttaaaattttctgaggtactaatattaaaacacaacaattatctttaaaagtattatttcaaaggagtcagtcttggtgattcaaattttcaataactgtccagttgctttaatcatgaaactctgagcttttaaattgttacaaacttgacggctcattcggaacctgtcttgaattttcctaacaaagtttctattaacaactacatgaacttccactgtattagaagttggtgttctgataaaacgagaatgaatatctacaaaatatgtctctattttgcaaaacgggaaacctatttggaaaagggccacatgatgtcgctctttaccgtcaaatagatcctacagtcatttc

SEQ ID NO: 52489 - DNA, 573 bp, Mus musculus
  source 1..573: mol_type = other DNA
ttactaataattactagtaatgttttcatgttaaactaactgctttctaggagtcagtatatattaataaagaaataagagcagaaattactgtaatttgtttaagatacacaatgtgtaatcaatacaaattgaatgttaatcaagaaatgctgtagagacagtttagaggcacattccttcattattctcaattctgagacctgaccattttgagcatataaattgaaaatgttgaacataaatgcattaaaaccatattaaacatcgagagcaaagtaacaataaacattaacaatattttaacatttaaaaagtttagataaacttgaaaaaaaaattaaatcatctcaagtttagataaacttttaaaatcttgtacccaaattatgtagattatactacatttactatttctaaactggataataaaaacgtctaaaacattactaagaatgtcgtttttctgtgaataaagaccatacttagtttaagttacaaaaaaattatacttgtccttgaaaagtataaacatttggatcgtttactatcaagatattaattaaaagaata

SEQ ID NO: 52490 - DNA, 656 bp, Mus musculus
  source 1..656: mol_type = other DNA
tcttttttactcttctgtaaagtcatttaaaaagtgctgaacatttgagtcatgaagatcaaaattatgaggcattaaaaacacatgtaattattttactagcatctaaactcactctcaaaagttaaaatattcaaagatttaaaggattgtggaaaatgtagattggtcaccaattatagtatgaagaaagaaataacctacatgatattgaaacatgtaatcaaaatcatataactcttataaagagaaatttacaatacttctttcttaagaagctactttaagacacaatcttgtcacaaagattcccagactttctatatctctagtcaataaaagtatatgaaatttgtttatcactttgtcttcttgatattaaaattatttactagatttgtcttaaattgaagagatccttttaggtttgtttgtatattaaaatagtgtaggaaaaaagatttttctaatactcaaagcgaaaattatggtcaaaattaaatatttaaaagctgctaagctctacatgttaaaagaacaaaatttcaatttagaatatacttttcaacgcataactgtaaattttgcaaattctacttatgatgtcgctcttagccactaaatggtgacaaagcaaggccattcaatttccatta

SEQ ID NO: 52491 - DNA, 498 bp, Mus musculus
  source 1..498: mol_type = other DNA
actagcctggtctacaaagacatagaaagactctgtcaacaaacgtttgaaagtataagcctgaattcaaggttttgaaaaaatagaaacaatggtttcttgtagcaaacagaaaatgagattctctagtcaatgtgtaatgtaataaaatgaaacttctttcattgttactgatgtccattttctcaaatgattttccaaaagaaatatttttcctgaggagccagacttggtctgttgttaaaaaataaatgaaatttacttaaccttaaaacaatgccaaaaataattgaattgagtattataatttgaatgtcaaaatttacctaataattatcatgtgatcaagaaagaaatcacctcttgtggtttttacatttgaagaaaaagttgcatattaaatattcacacatgctaaagaaatgtaatataagacattgggatattaaagaaaaagtgcattcatgcaattatacttacacatttccatgaaatgta

SEQ ID NO: 52492 - DNA, 820 bp, Mus musculus
  source 1..820: mol_type = other DNA
attggttctatacaattttgagaatgattaaaaattttattctttatagtgatactgataaacttcattgccatctataggtttttatgtaaaatttaatatatttttgtagctcagataaaaacaagacaataaagttgagtgaatgagacttaaaatgaggtttatatcctagcctcttcacattaattttttaaaaaaaataagtacagagaaatgtaacttgaactgctgataatatttttgaatgaagattgattattttttcaagtaagtaacaagtataatttacattgaagtggaaataacattcaccctgagtatatttaagctttaaaatgatatagccttacaaatgtctacagttgttgttgagtgaattcattaacatcaaaaaaataattatttggataaaatagtaaatggcttactagcattgaattgagatttttgaatcattctctttagggctaaatcaaataatcagaataatttagtgtgtaaaatgatttagcaaaacacaattatagtccattcaaatatgttacatttctttaaaatctcttaaaagctgtatcgctgctacaaatgtatgttgtccatattattttacatgataatatagtttgtgtagcaatatgttcttagatgtctatataaaagatgaaactacttcatgaattataaaacaacctctaattagttactagctattgaaatatgaactagttagaagctttcaaagaattgcacttacactttgagccacagggtgccgttgttctccaagaagagcgccagcagaagaaaatcagatcat

SEQ ID NO: 52493 - DNA, 533 bp, Mus musculus
  source 1..533: mol_type = other DNA
gccactacacttataatatataaaatatatcttttattatactgtttggactgtagctatcataacagataacagtaatattcttttgcatctatctcggacttggaaaaaaatcagagttaacttaaacagtaccgaatgttttcctattgattatgaaattgcaatgtagtagggataaaagcaagtttaaaccactgatagtagcttaaatgagactaaatcacaggatgttatttcttggtatgttttctataagttgaactgaaaacataaaatcattgttttatatagattgttgtgtacccacacaaacatattacaggtagacacatcctttaagatataaatgttttatccagtctaatgtataatgttctctaattaaaaattttacacgatgctgaaaataaataatttactgttcctggataacaaatatttagttcacatatacatacttgcaatggaaaatttagaaaatgcaagggaataaatcgtttttcttttcaaagaaagtcacttccttcaga

SEQ ID NO: 52494 - DNA, 591 bp, Mus musculus
  source 1..591: mol_type = other DNA
agaaatcatatatgtcaaaggcagagttcatctagatcaacatccttcatgaattctgtttcaaatgataaagtgtgaaaacattgttttcttattctgcagtggacacaaactcagtaatttattacaagaaacttgctgataatggcatgtatatattaataagagatcattacatgcatcagtagatacatgcatccctcataaatttgttcaagaaaatttattttttttaaatataagagaatgcaaacctacatataagggcatagtgtacagaacactgttattttggaactctgtaattataacaattcaaatctgataatattttatataataaataagatgttaggaaactgtttaactctagttttttcaagtttacctaaagaaacgagccttctttttcaagtgtttagataaaagaataattttgtagatgtaagttaaacaagaatttaatatgatgctgttcaataaaaagtaccaccttcacacatgtggtgaatcagaatggtcaataaatgtgcattttggaattattttgggcaaaatatacaaaatgtgaaattctccagtggtggatgt

SEQ ID NO: 52495 - DNA, 297 bp, Mus musculus
  source 1..297: mol_type = other DNA
gaacaactttatcaaatgaaagatttgaatgagcaatttagtgtttaatatttaattaactcattctttatcagaaactgaccattatcctctgcagatcaggttaaaagtgaaagctgctgccacactgtgctgaagaacaccaccagaaagtgttggtcccgaccccagcccgggcgagcgcggactgagcctccccacccgggcagtctgtaggcggcgctgtgcccctccgcacccgcaatgcaagcaggcggaacagctcgtgcgttttccagtctcctctccaggagttcg

SEQ ID NO: 52496 - DNA, 387 bp, Mus musculus
  source 1..387: mol_type = other DNA
cttaaaattttactagttttctttttcctactttgaccaaaacaggtcgagtattatagagaatattaagccctgaaatactggttaattgtcaaaggcttttctcaagctaatcttatgagacgcgtggccgcggtcccgcggtctgctgggattcagagtccgccgccacttgggtgcggaatccgagctggacttgcggagcgccccctccccctccccttagagcatcagcggcggcggcggcagctggcagtcgcagaaagacccgcggaccgcctggaggcgagtggcgggggcggcagggcccggagcccttgagaacgcttgggaggggagccgtctcggcgagggcggaggcggggcccgggcccggcgtggagcagg

SEQ ID NO: 52497 - DNA, 288 bp, Mus musculus
  source 1..288: mol_type = other DNA
aagcacatgaagtcagtgaaaaacaggctttgtttgagactgaaaaccaagcttggagaagcattttccttttcttcaaggagcaacaaataaaggctcctcgaggacctgctcttattctaaataatattaatctttacaccattcctcttcaaagcagaaggcagaggacagccctttaaatggagattcttcatctatctccatcaaaactatggatcctgaacagttgagctccacccctgtctagatttcccagtctaggacttaaataggatcatattcact

SEQ ID NO: 52498 - DNA, 218 bp, Mus musculus
  source 1..218: mol_type = other DNA
aaattagaactgcatgcatttttcaaaagcacaaatcttccctttttattttaaaaacttgggcactgtccagtggtctctggggaaataggcattgctaacatgtgtacctgttttgtggaccaatttggacaatcagagattctgaactgtgtatcaaggtcatttgataatgtaaaatataatacatgtacgtccatcttggagcatataaaaga

SEQ ID NO: 52499 - DNA, 507 bp, Mus musculus
  source 1..507: mol_type = other DNA
tgtgctgctaaagaaaagtgactgtcccttaccagaagccatcagctgcccacagctcctcagggatggggatgagcttttttttttttttaaagataacttttaaagttagcaataagtttcaacttacatactttgaattcttatttaatgaaccatcccttaaagacttttaaaaggataatgaaggacttttaaatatttattatgcatttgttattatgagcttattaactttaacaggtgttgtagatatataagagccttattatctgatagaaagagtttgatgtgagagcagtaacctaaccacaatctaatgtggacatccccacgttctgaataaatactgggaacttcctagtttagacaccttctcataaagttaatttctctccttacatagtattgtagaagcaatgaaagtctttaaaacacgtacaagacattaatatattgaaaatctgctacttaaatatgaacatgaattgttaatgttttggagaa

SEQ ID NO: 52500 - DNA, 540 bp, Mus musculus
  source 1..540: mol_type = other DNA
aagccagagctctagagattgattcatgaataaaatccccagtactcagcatcaaagactggcaagaaaactcctgtctcaaacaaacaaatcttttgaaagaaatataagcctgggaattatctcacggtcagttcattagctctgctcagggcacatgttacataccaagaactcttactgtttcagaatgctttaaagtctgttttcatttacattgaggaaccaacttcaaaaaacaaacaaacaaaaaacatctttcctgttaacaagcagttgggaacatcttaattcacataacattttgtgtaattcacattttgttgtaagtgaatcaatttgtcagttagacacacacatattacagagtaaatttatactttaaagtaacaaaaatagtactgtaatttttgaaaagttaggagagttagtagtccaatttaaagtagtagtcacaataacttggaaagttttagtactttttcaggcaggtctctaacactttgaataccagctgttaaaacgggttctgctgatgcc

SEQ ID NO: 52501 - DNA, 557 bp, Mus musculus
  source 1..557: mol_type = other DNA
tgtagaataaaatacaagtacttttttcttctgtttctgatccttcacaatccacattaaaggcaagaatcttcttgccttaatggggagaattttcataactactccccattaagtttggtgcacagcacatttcctatgtcacacatttcacactgtctgagcacgtttaaaatgtgtacatcctgttaaaatgtatagacctgatcttgctatcattatatgcataacttctacaaattaaataactatctggtaataagttaatacagacgaagctaataattattatattcctgtggtattccatgggcatgaaaatgtggacgaaattatgcatttttacaaataatagatgagtaagttatcacttaaattattttaaaacttgtaggtagtaattacaggtgagggtagtaccctagcaggtgtgcacttgtaatgtaaatcatgtagaaaaaaaaagtggctcttttagagacaggtaattacatttagtccattatactttcctagtttaacttgtgtggcacaagaaacgcactcagtactcagac

SEQ ID NO: 52502 - DNA, 590 bp, Mus musculus
  source 1..590: mol_type = other DNA
agacgtctctgaatttttcgtgtgaaaatggaagaagaaatttgaagaaataaaatttcccggttttaatatggtactcaaagtttgaaaccaaatattttaatgacttaatgcaccaatgcataaaaacaaatttctatttaaatagacacaggagagttttgttacctattatcttaggttgcatcaaaatttataatgccaaagtactttaaaatattttagtcttggaaggttagtcaatcttaaaccttagtttatttttaccaataaaccctttggtttgtgtcagctgatgaattcgattatgcagctgtaactgtgcattatcgtgctccaaggtaattccttctgtaataatttatagtaaattccttaaattcttgatattaacaatgtacctttgatagtttatcaccgtggaaaaaatactttcaaaatgctttcttgttttgtttaactgattattcaaatcctccatttatgcaaaattgactatgcaatttttgcatacacttttaaaacgacaatttggaaattttaaagaagcaaatacctctgtttgacttgaaaatagaactgtatgaatt

SEQ ID NO: 52503 - DNA, 603 bp, Mus musculus
  source 1..603: mol_type = other DNA
actgagattttatctgttttttaattacaaaaggaactggaaatagatgatctcaaagactctttgtcaaggagttatttgttctgaactctttaagcctactattcatttttaaaaggacagatccttgtatatttatacctgcaggtgtaaatggaactacttaaggacattcgagcatattttagaaacggcttatttaaaaataaatcacaaatcaattcaataacttggtatttctgcaattttcccaccagtgtagaaaaatagaaactatacttagaaaaataatatcttttttagggataatgtgctacagataatttgaaaatgtttgcattgctcaagagttcttacttcagaagaaaacacttctattatgaagtgaattcgaaattaaggatttaattcacttggttagattatgcaaaatgcaaaagtattgtcgattcccaccaattggccatatgggataattgaattaactttcttctttcgtcctaaaaattcttctggcacatgccggacgcaagcttttctaaatgtccctttggaaaatttcaaaattttccgatttgaaaatgctgtcaatttttcaatatg

SEQ ID NO: 52504 - DNA, 534 bp, Mus musculus
  source 1..534: mol_type = other DNA
agaaaggacaccctttttttaaatcatgtttcctgattttagagaaatgttctgaattgaaaataaattctttggctcatttctatgcattaaatacatagatactattttctatttaaatacacacaggaaagagtttttaggttgcatgaaaaattgataatgtcaaactacctccaaatgctttagaattagaaggttggccaatattaaattttggtttgcactattagagttttccaaaagacaattccctctgaaatagtttataataataacacaaactgctgattttaagcaagcaactttgttctttgtgagaaagcacttttagaaatagaatttactgagttttttttttacctgattattcaaaagttcaaatcttatatatagtagtggatgaccttatctaattatgcagtataaggcaataacaaacactttcaacttgccattaatctgaacattaaaactgtgttttgacactaaagggttgtttgccttaaagctagaattgtatcaattatccca

SEQ ID NO: 52505 - DNA, 487 bp, Mus musculus
  source 1..487: mol_type = other DNA
ttaaagcattgaagtccccttattaaaataaaaacatattacagaaaaatggtaaatataatatttgtcatagcattaccctttaataaagttaaaaactgaaaactaccattgtttagaaactgcagtataatctattaacccatcttataaaactcctaacaaagatgagtaatgtgtaatggtagcactcaatatgctgcttctgtatagttgaccatcaagtagttctgctaataccaacttattaatcataggatatatcacaacaaaagtgtataaattcaattatttctggttaaaattaataagaaacactcagcttaataaattataagcccataaaaagttttttttataatttcaaaagaattttgctaacactagtatacaatattaacatattatattatgaatgtttcgaggtatgagtaggctaaaactcaaaactagggtttgaattcatgatgactaaactacatgcaat

SEQ ID NO: 52506 - DNA, 378 bp, Mus musculus
  source 1..378: mol_type = other DNA
agttggcttcaattgctacaattgaaaaaatggtggttttgttactacagttggggtacctgcccaaccctgccaagtttccctaagcaagacgcctgaactcttcaagcacttggaaggatccaaggcagcagataataaaattctaaaatgtacagatgagaatctcaagtatctgttgtgagccagacacaggctgctgggtcttaaagcctcggagacctgatattaaatcacaacaaatggtggcagtctttagaaaggtgaaactgcttaaaaataaaaataaaatatattcttgcagcccaatttaattcaccaaaatcatatgtagaacacatcaggatttaaatgtgctttgaaatggcaaaatgaaga

SEQ ID NO: 52507 - DNA, 512 bp, Mus musculus
  source 1..512: mol_type = other DNA
atttcagaaatatacatatacatatacatatacatatacatatacatatacatatacatatacatatacatatacatatgtgtgtgtgtgtgtatatatatatgatgaaaatttcatgaatgatagacaaacgctaattaaatttaccctgttaagtcacaatacaatcattagtgttctaaaaattgaaatgatgaagaatgtttattctttgaagaactaaatctcttggaacttggcctattttataattatcaaggcacagctaaataacatttaaaaattcaatgagtgacacaattatcacttttttctcctttctgaatgtatgaatatttcaaatcaaatattaaaaggtgtaaagataattttctttatatttattatatttaccttcttgaacaaaatcgaattgtttttaaatgtattcttccactcaaaacttaattcagtaaaatcatactagaagctgtgtgtgtaaactaaaagacacagcaagttttaattaagag

SEQ ID NO: 52508 - DNA, 514 bp, Mus musculus
  source 1..514: mol_type = other DNA
tgtataaaaatactcttttcaaatgtctctcatagaaaagtaaattgcattaagatactctgtggattttgttttacttttaaccttaatcaaagtggaggagcttcagtgtttttcaattatgcaatttccacagcccaaaagacccttcctgagacaggatccattttccagcaatcaaatgtattggtcatcacatacaatgaaggatagtttcaaagaatgtaatttggaagtttaaaactgtattttcaaaaaataatatatttatgtaaaacaaaaggaatttgtaacttttacaaattttactgagaacaagaaattttgtttgttcctttatggtgttacggtcaaaatctaaatgattacctatacagataaataagttttaaatgaacgactgtctttgcagagacagagctttgctcaaggctgccatacgagacttaactttgacctaaaaagtgggccacacattttagcctttacagtgtactttgaaacaaaaaatatc

SEQ ID NO: 52509 - DNA, 341 bp, Mus musculus
  source 1..341: mol_type = other DNA
aggaactggttctttgagacaattttctagacagttactaaataagggtgggaagcataattattacacaacaattttcctaattaaagacttcaaatgtaacccagcttacaaaggactcagtttacatttttaaaatcaaaaggcaggctcattgtatttttttcttgagataaaagctacgattttaaaactatcaattacctgaagtttttacaagtctcatttaggaaaagataaataatgctaacaacttttcagattttcttaaattttggtagataaaagccaagataatttttttgttgttgttctactcttgagaaagagaatagcactca

SEQ ID NO: 52510 - DNA, 404 bp, Mus musculus
  source 1..404: mol_type = other DNA
ggagtttattaccaactactatttaagctctcagttaactaaatcttaacgtctaaaagagttgagtgtttatgaaagagttccaacccaacggctacatagagagaccttgtctcagaaactcctgtttcttgtttgtgaaaatggagaattcacaatcatctcatctgtagataaggaatctacttgcacaagattcacagctactctttctgtggttcatcacactactagaaacatacatgcaaacacatgtatatatttcttgcaaatatttttccttacggttgtgatttaaaagcgtaagaattattgaatcattactctccagcaactgccagataaaggtagctttaggtttttaacatccatttttatcacataaaatgttaagatgctgtgag

SEQ ID NO: 52511 - DNA, 449 bp, Mus musculus
  source 1..449: mol_type = other DNA
ttggatgaaccatacaagcgagagactgatcattccctttaggctctgcataggtctgtaagatatatactatattaaaaggctcgaaactttatactttcaaatggaaggatatatttaaatatacattatatcccaaatataagaatcgatagagcccacatatgtctatttcgcttctctcccttggatattgaagagaagaagggatccatctgtactttaacaaagcatgtctatattgtgtagaatttgcaggttgaaactttgcattgactactcatttgttactctgtactgtgtattggaaaatatgtgcgtgaaaaactgtccccgggttattttttttttgatgttgaatacactatctcatttggttattgacacagcaacagcgttacatactcaacaaaattttgcctttaaatctgaaaatgtaaggctccgtg

SEQ ID NO: 52512 - DNA, 586 bp, Mus musculus
  source 1..586: mol_type = other DNA
ggaaagataactgtgcatatatccagccatatatagaacttacatttttaaaaattcaactcaaattagcatttttccattggaactgtttcgaatgagctggggaacttttgaaactgtcaatagtggatatcattgatgacattaatgctatattcaagtagccatatactgcttcattagcaggaacatggcattaattgattgcatttacagattaaatatttgctttccttaggaaatcaaatgaatacatcctaaggtcagccttaggagagtatgagtgtcctttactcaaaatggcacaattgaattgtgcaccacttactgaattgttgtaacttgtaagaaactgcaactaaactatgactttttataatgtattccctaaagtatgccatctttcataatccaaggatatttgccttttcacctaaccaaggccaagtgataaagggatgtgttaaacttaacaatgttatagtcctgaagctttaaaatcaccacaaaataaatatttgtctctgagagaaatttgatgtgaaggaaacttaagtagcattcatcaaattgtctgtgaagacac

SEQ ID NO: 52513 - DNA, 591 bp, Mus musculus
  source 1..591: mol_type = other DNA
catatcctcccatatgcacatgagcacatgtttgtatgcatgtgtgtatatgtgtcttcagacaccgtgtccctacatactctcagtgatgcatatgtgtatatgtgtcttcagacacggtgtccttacatactctcagtgacatggagctcactgtgtagacttactgtgtttttaatgtaaaagcaaggaatccaatattaccttgtcttaagttcactactaacaaagaagtagtgtgttttaccaaagcggtggtaaatatttgtaactactaaagaattgtcatgaaataaatattttttattaatttgggtctttttgagctgaacattcaaagcactaatgatttcatacagagtatggtctgtgtttggattccaattcaaacaaaccaacaacaataagctatatgcaaaaagtatttctacacatctattgtggtaatgatttgtaattatattttaaaggctttgataattataaataacagatgaatatttagaaataaatgcaatctatgtgacatttgcttttgaatattctagatagacataaaattttaggagaaaaatattaaatgaaaaaatt

SEQ ID NO: 52514 - DNA, 480 bp, Mus musculus
  source 1..480: mol_type = other DNA
gagcaggatccgtttagaatatattctcttacttggtcaagtgtatgcttaataaacagttactaagaaatgtgcaaaatagtgaagttcagtttcacaattttatgttgtcagaatttggacatatcaaactttattttgtctcttatgagtgttcctaagaaaatggtacgatgattccttgaagtgatatcttgcaattttcctaagaatctcttactgatttttgtaaaatcaatgacatgtgagttctttgaactatctttagttttacagttttctttaaggaagaatataaactgttggaaataaagattctactttaaacaattttatcaatgtaatttattgtgatttaggttaataaaaaatacatttgacaaattaatattttgtctcaaatttacttgactttgaaacccaatgacctgcatagtcacatggtggcgctgcaggacaggatgagagaatgtttctcaa

SEQ ID NO: 52515 - DNA, 320 bp, Mus musculus
  source 1..320: mol_type = other DNA
aaaaattctacctcttaccatgtacaatctgagttttaataggtgtgtgaaccttttaaatatagttcactggagtccgagctctgccttgcctgtcccagagaagagcagctgcgtatagccctggctatcctggaattcactctgtagaccaggctggtctcgaattcattgggattaaaggcgtgcgacgcccggcatttttgaggcagagcctttaatatatatccctgttctaaaatccagattggatcagctgtgtagttgggagaagtggccacttctcaaacgaccactgaaagcattctgccattgtcctc

SEQ ID NO: 52516 - DNA, 478 bp, Mus musculus
  source 1..478: mol_type = other DNA
aataatcaatgagcaaaataaataataaagacctaatttatcaaacttcatagttctgttcttgtaataaaagtatgccaatgcaggattgtgcttaaaaaccaaagtacccagtgtagtcactggctatggacattccacaacaaaatcagaccgtttgtgtttcagacaattctgttctaaatgaaccgcgtcatcataaaaacatttgtttacagttatagctatctgacatattaccaaaatatctaatgaagccaaaggcttagttcctttcaaggcaataagcatgatttttcgcagagtgaacagcaatactgtataccttatctctagaaactatcttgcatttccaaagcaaagcttttctggaaacagcctacacgagaagacgtagtcacggaacgacgtaattacgaagtgcgcctgcgcgcgccgctagtacttccggaagagcggcggccagcccctcccgccg

SEQ ID NO: 52517 - DNA, 339 bp, Mus musculus
  source 1..339: mol_type = other DNA
ggttttcatgatatatcttttacagtggataatttctctagtaaagagaactctttttgttaagacttactttttttccaaagaaaagtatttcattagtatatcatcttcaaaaatgaatgtatggagtttcttaaatcgaactgtaatagattagatttacttcgctcaaatttggtgaaaagataattttactaatattttaccaaaaaaaatttacaatgtatactcttcacgctaaagtagttggtatttttccgggagaattccagaagcaatggccatcatctccagcatcgcaccggctcggagcaggcgcgttgagcgcaggaagcgccg

SEQ ID NO: 52518 - DNA, 311 bp, Mus musculus
  source 1..311: mol_type = other DNA
ggtctcaaccatggagaccaggctggcctcaaatttgcagagacctgcctgtctaaagacgtgctgtcttcatttctatttctgtgcttcaagaggaaaatatacagaagaaagcaaaagcttatctttaccaatgtcacctgtaattcttagaactggttgtgtctatattttccacattaaatctccagacaaatatattgtctgacaccaaatcatgtgtttatttaatgaatcagttaagtggaaaatttcaagaattataatccataaatacggctgatgtttctgtgtaaatattaaacaccagt

SEQ ID NO: 52519 - DNA, 608 bp, Mus musculus
  source 1..608: mol_type = other DNA
agtgcacatgtatttatacatacacctaaacacaccaatacataaatgtaataaactgtaaataataaagtgtttcaagactgtctgtcagtgtctcaccaagacttactggtgatcaattactttataaattaatatcattaaactggttgaagttaaaaacttggcttatagagttacatatttagaaaaaattgtttcataaaaacaaatatgacgttaactgaaaataggatgctttaagaaaatctatgcattaaaatatctctgtagatctatcttttgcaagactatctttgaaaagttttaccaagttgataaaatacacagaaattaaaacactaaatacagaatttacttcaatagatatgtaaaatgtaaggatcataatccactgaatactaagactgaaaatattgccatacatgaagacattgatggcatttgtttccaaaactggaaaaatatataatgatgaaaacattcatgaaatgataataatacctttgctgtaaattaaagtcaaaacaaaagctttgatttgaccaaagggaacagcagggttctcctagggcactagctgtctttttgaaatcccagagaaacct

SEQ ID NO: 52520 - DNA, 517 bp, Mus musculus
  source 1..517: mol_type = other DNA
taaaatgaattctgggagagtctatctgatgatacattattccaaacactgatgacaaaatataactccggcgtgttcagttttaagaatatattctgcctgagtgatatatgtcaatgatttggagaacagtaaataataacttgctatcacaagttactgggttttttaaataatgctatttatttaaataataattttctgacacgaggtactatttgtccatatggtaggccactgcatgagaaataactgcagagatttatgtattggtgtgaaatgagtgcgcatttgggtgtgtgcactgagaagtgcacatttgggtgtgtgcacatttgtttaaatgtgggacacactacatacattatgaggtgatcatatatgtaacttcttaatttggaacaatttcaatatattaccattttaaaataaataaatcatcataaatttaaaagcaaaaacagaaaaacttttcaaacctttgctagacttcgtttttcccagacgcgttaggaac

SEQ ID NO: 52521 - DNA, 410 bp, Mus musculus
  source 1..410: mol_type = other DNA
aagtcctagattataaaattatagatttctaattaaaatctttgtctattgatgagaagggtgatgtcattaaatatctgtcttaaaacaaatactacttgtcaactaaatacctaggatttcctccatgggaggtaaatgaagccacgggaagtcataataataatacggtaacccaactcagactttctgtctgagataaggaagctgcttatatttcatagccttagactggaggcctggaaactttctcaaagacttcacaagtctgcatatgacagcatatataggtctctctgcaaagatacactgagagctgggtttatgctcatgaacctattctgataaaatatgaagtcttgatatcaacaaaggtaagaattttaatttcttggttaaacaagaatagc

SEQ ID NO: 52522 - DNA, 591 bp, Mus musculus
  source 1..591: mol_type = other DNA
agatatggctattgttttataagctctgagagaatatactattttcatgtgtcattaattttgagtgatttttaaactacatcttgaatatacatggtttcctgtgatcatataatttgaacaaatgaaacatttactatagaaaacctatagaacttatcaactattaaacatatgaaaatcatgataaaggaactttttgaccaactttgtatggtaatacaaataattaatactgcaagatcacctggctgttttatcaactgctgatcaaacataatcatgggtcagtataaatacctacatttttaataagaaataaactaaaaatatatttgttagagatttaaataacgtttacaacaaggcttaattttctctaattaaaaatgagaatttgtgctcaagaacataacctaagcattgcttcctgaaagatatttttaaaatatatttggatttatcagagagccaataccttaaaatgtacctttaaagtgtacagaaatttgaagaattaaacatctttctgtaaaaatcagttaattttgcttcaagatgatgcagtaactaccatgagatggtggtgac

SEQ ID NO: 52523 - DNA, 557 bp, Mus musculus
  source 1..557: mol_type = other DNA
gaaatctgtgtctttgactcaaggaaagagaaaagaattatggataacacaactggattaatcatctttctttgaagggctattttcagaaatcttaaatttagcttagcttgatggacagtaaaggaatcacacatggaattccttaaaagttgttttccacttcctttaacattttttaaaagcatacacaaatgtagctgatgttacaataattctttaaatgttaataggaaccaataatggcaccttctgcttgattacactggagtagattcattcagaatgtgtttgctatcattagaaaaatgtgataccattcctgttatgccggattgtaaaagatatttccacaaaaatgagtgagaatttttcagggaacacctaagaccatttgaaattggacatattattcttgtttcagttaatctctgaaatataaatgtcataattgcaaatttaacagaaaaaaaatcctctatcagtttcacaaaacgagtgcagtatgaaattaagactctaagtgttgtcatgttaaaatagttcgtttaaggacc

SEQ ID NO: 52524 - DNA, 552 bp, Mus musculus
  source 1..552: mol_type = other DNA
tgtttgtgtctgtgtgtgtgtctcacttaaacactcatctagtttaaagttcaattattgaggatgtaccagcctgatctacctagtctctctctctctccccacacacacatatatggaaagagggcaataagagtattacttctaattgtgtctttatcttccaagtatttttcaactaggaagaaattggtgatttaaataaaataacaagtcagtagaatctctattttaaaaaaaaactggtgtaaaagtttcatcctgttcaaatttcacaatgttaatctgaaaacttattggtgtgtgattaaaataacacttaaagattagtttaaacgggatcttgtttactctaaaaatgaattaatttccagtaacaactataattcttaatttagtggtgtatgttgaagccactcacagatctgataattaatataatcatactttaaacaacacacattttcacttacttctaaaatatgtgtttaggaacaaatttaaacttaaaagtaatgagaaataaatttaaagtaactgcatctaagtgca

SEQ ID NO: 52525 - DNA, 612 bp, Mus musculus
  source 1..612: mol_type = other DNA
tgcacaatatctgtgctaaatattacctaaagaagcaataaaggttttcttttattttctaatgggaatgttaacattaccaggaagaaagtatgtctgaggaatgggacaatctgcctaaatacaaacaaaatagtttgcaacagtactgatgtttccaaacattatgaaacagcattgataatctagaaagagcagtaacagttgtttcaacatatcgtagccaacaaagaaatgatttgtgaacttgataatttgtcactcaaaagggtaactaacactttgctttaagtaaaagtacactgcaccatacggtgaccaaagaatggaccattataatgtaggtttgcataaaaactcaaaggggtatttaaaacatctttatcaaagaggtattttaactcggttgctaaatatgtaaatactaaaatatcattatttagttagtcacaattattgtattaatgcagaggctgcagtttcatagtgcgaactctgggcaagaggctgaagaccgcttctttccgagaaaaggaagaatcgtacggagctacttcgtaacccggcgtctccaggctggtgagcgggccggggacagaggcggccaatgct

SEQ ID NO: 52526 - DNA, 443 bp, Mus musculus
  source 1..443: mol_type = other DNA
tttttaagaaaccatgaactgtatcattaaaatggataaatcttatgtcttatgtggtaatccatggcataacaggccaggctggtctatatagcagttccagaccagccagggctacataatgaggccttaatataattatgaaatgaacacacatatcataaagtataaagaaaacatgagtgttatataacctttacaccaaagttatttctaaaagttgtaaagatatatgcaaacaaacccaaatttaaagtaagttgggctaaaattaagccaaaaatcttttgagagttaatacagaaatatcattccacttcatttacaactcagatatccacaaatggtagttgcttttgaaatacgaaatcatctataatcaaatattcttgaatacaagccttcaagaccagtcttgtaagacactttctcaaaagctctga

SEQ ID NO: 52527 - DNA, 525 bp, Mus musculus
  source 1..525: mol_type = other DNA
tttaaaatttctcttctaaggaatcatatctatattcaaatcatgagtttaaatgcatgttaattttgatgtggtaagtagataactacacaaaacatcacttcccttttcaatgatgattagcatgggtgtgtttctgtcacactcatttacagaaacacagtgaagacatatctgttctttagtctaaaaacacaaactatgtgtgtagaaaacagattctagaatataaacagggtgaaaaatgaaattattggtatttttgtctcgtcttttaaaacgtgttaaattacactaaatattttgggttttcttctgaatagccagaaaattcaatatacccaaaacaaagttgtgtaagattcacgacataatacagaatgttccacaatgtagtgtaagtttctttaaaagcacaattaaaatgtgtggctctttcataaccccatgttcagagctatacatatattttgggtagggttccactcagagcccctgggcgccgctgtcggccagtgcagagca

SEQ ID NO: 52528 - DNA, 412 bp, Mus musculus
  source 1..412: mol_type = other DNA
gaggccagcctggtctacaagtgagttccaggacagccagggctaatttcaaaaaaaatcctatataagaaaaagtacatctttccaatcaaattaaaggaagctttaaatcatctttcaaagtgaattttatcaaaagaaatatacctgtaccaaagttgtaagatttttcaatacaaaataaacattactatgttttaagttggtgtgcttctgttgaaaataaaatccaaatattatcaatttagcttattatactctccaataagaaaccttgagaagggctctgatgcagctctaaaataattcaacagaaaaatgcatttgctgaaatattatagtgggcctacgaggagcaaatgggattctcagggtccaaaagcactttaaggtgcttccgctgcgggagacc

SEQ ID NO: 52529 - DNA, 529 bp, Mus musculus
  source 1..529: mol_type = other DNA
gagtactctacagcgttataatacgatttatccattgaagtcattgtcctacatctttgtcccacaagagtaacaattattatgtgcatatttcagttctgttatttgtaaaagtgcaagcttcaagagcactcttttgacattgcaaatgttctattaaatttttgagagcaatgctgaacatcctggatgtttggatacagtcagggttgcattttataactaacgagagctagagctgatggcaaatataattgcccgtagatgacggacttgggtaacaatgggccattggtcctgtgggccttcacgctttttaatttgaaggaaatacactttcaatctaaccaaaatgagtatacatgtttatatatgaaagaatatttattaataaaaaatttcactagggaaacaaaatcaatgagaaagaaaattcaaatgttttggctatcaacttattccactcagagcctctgggcgccgctgtcggccagtgcaggacctccaccctcggagcagcgcgcggagg

SEQ ID NO: 52530 - DNA, 402 bp, Mus musculus
  source 1..402: mol_type = other DNA
atatgaaaaatctcacgtcaatttttcatcaaaataccttctagttttggatatgatttacaggcatattttattatcttttaaatgataaccataatactattaaaattttgaatggaacattccgtcgttatcatactcattaaattgcctgtgcaatgcatatactcataattaaactaataagataaaactcctacctgagaccagctggaatcacaactaacctgtgtattttaagtcccagtgttattttgaaacgtttttttaattaaacaagtccatctaataactacccttttcataagtgctcttggtaaaatttacatcacatcacatagacaccgggtttttattagtgttgcaataataagattgggccctgttgaccaatcggggaac

SEQ ID NO: 52531 - DNA, 211 bp, Mus musculus
  source 1..211: mol_type = other DNA
ttaggtatgtaaatgagctaaaaaaagaaaagaaaattctctcccatttcatgtcaggagattcttacttaacagtgattgaacatttaacaatccttgtgatgtatctatattacaactaaaaataacttctggcattgacgatctttattccaaatagaaaaaagacgagctttttaattcagaaagggttctgattgcaattttataa

SEQ ID NO: 52532 - DNA, 269 bp, Mus musculus
  source 1..269: mol_type = other DNA
agaattgtcacatctctccctatgagagtttcatgttgggtgctgaccaacataaggacaagaacacttgatctgcttctggttttgaattaccatagctcacacttagctctgtctgcacctataagcatgcgctgccctggggctaagcttgttcttttgaaatggtccctgttggtaattaacaacaaatcatggaggaaaaccccgagactgattccaacgaatggtagcttcctgttgtagcaaatatttgaacgcttcttaga

SEQ ID NO: 52533 - DNA, 424 bp, Mus musculus
  source 1..424: mol_type = other DNA
attaatcagagtatttgagagatcgtgtttaaaccaattactattacacgaaaaaaaagacagatagggaaatttcacgttgccttttgttccttaaaaagcatccttgaaaacaacaatgacatccaattttgaaggatttaatttcttaattttatttttaaaatctcaaaacagagttaagacaaacagatagcagtactcttgatttgttctactgagaagtaatgaaatacactcaaagtcatctacctgtaagctatcaaagataacgattaaagaggtgggcagatccgcccgcagattgagtttgctcccctggcgctggctgagcgctggacaggaaggtcctgctcaaagaacccggcgctagcgcaagatctggcccgggcccgtcccctttcggcgccccgggatgaggcag

SEQ ID NO: 52534 - DNA, 277 bp, Mus musculus
  source 1..277: mol_type = other DNA
tgctgagatagaaggtccatgagcagtaacatcattaatatctactagagaaaatttcagaagaagaatcttcaggagttgcaaatatgaaagctgaaataaaattaattttccagcacccacatttcctgaaaataatggcctttaaaataggcattgctatgtatttaagtttaaagtttatccccatgtattctaagacacgacgctccaagagtaactgctctgtgcttggcacagaggcgtgtgatgacactcgcctgtggtaccagcactg

SEQ ID NO: 52535 - DNA, 246 bp, Mus musculus
  source 1..246: mol_type = other DNA
tgttacctctttctccgagtcagagaattcagagacagattctgggaatatggctagaaggttctgacaaagcttgatcagccatgtgggctttgcatctccacaaggacacatttttgttggttcaagcaaaaaagcttctgaagtcacacaggaagttgctgggacagaacactaagggggggctgtggggaggcttctgtgacacagatttttcgacggttcccaaggtttccgggaccgagg

SEQ ID NO: 52536 - DNA, 428 bp, Mus musculus
  source 1..428: mol_type = other DNA
ccatacccagagtactcttatgtcagattaatctgtataaatttctatcaattataagtcactgcaactcttctaaaaaaacatgtcatgtttaacatatggcctggcctatagtttgtgcccaacatgtagtaattatttaattgctggttatgaactccagctggaattggcgctggctggaaaaattttcaagacaataaaattctggctggagcatgagatggtctagctacagccaaccgccagggggcggtactccccgctgtggcctggcagagcagcgccgccgtgggtccgaatggttaggcccgccgggcaggtagcgcgcttccgcggcgtcccgccacccccctcccttcccccattggtaggggctgcgggtccgggcgttcatgaggcgcgcgcagcccagcatgttaatgagg

SEQ ID NO: 52537 - DNA, 502 bp, Mus musculus
  source 1..502: mol_type = other DNA
ccacctggcccacccggtaccggtggtttggttctgtctccggctccggctccggttcgggtcccggctccaggggcgtcctcgtccggctcagggcccccgacgccctcccggagctgccgcctcaccggctccgggctggtggctgcggataccggttccgcggtccggattactccggccagaggggttgggggagggcgcctccgaaaccgtcctgggttctcgcgttgcgggcccaggaccaaggggcgccgcccctcctccccccggaggggatgtgcagttcgagtctcggttctcgtcgagggtcgagaggtcaggagaggctttgaccaccagtctagccctcacgtccagcaatcttcctagctcactggggaaatttggctttctgcacctgagaagggcagggtggccgggtccccttccaggttctgagtctcaagcctcggaatctggaccaagcgtagccttgggaggcaggctgcgtgcttgcgca

SEQ ID NO: 52538 - DNA, 364 bp, Mus musculus
  source 1..364: mol_type = other DNA
caatgccaggcgatacgccacggtcttggccatggtgctggggggaccaggccccgagcctcagctgcccgcccgcccgccaccggacgacagccccacccccgccgtgcgtgctgcgcaagcacgcagcctgcctcccaaggctacgcttggtccagattccgaggcttgagactcagaacctggaaggggacccggccaccctgcccttctcaggtgcagaaagccaaatttccccagtgagctaggaagattgctggacgtgagggctagactggtggtcaaagcctctcctgacctctcgaccctcgacgagaaccgagactcgaactgcacatcccctccggggggaggaggggcggcg

SEQ ID NO: 52539 - DNA, 308 bp, Mus musculus
  source 1..308: mol_type = other DNA
atgttctctttctctctcattctgaaatagaacctgtatctcttactgatggtatttaagtttgaggacctgagttcaaatttctagaacgtagtgctagcatctgtaattccagtgtgcccggtgactcagtttccctgatcaagctcgaggagctcccgaccgccaggcgcacgctgcgtccgcccggtggcctggacaggttgagttccactgctgctgcccctgtgttcttccgcgccggcgcgcagcttgacgagagtgggcggagcgggccaactctggggcggggccttgtcgtgggcggg

SEQ ID NO: 52540 - DNA, 217 bp, Mus musculus
  source 1..217: mol_type = other DNA
ctgagtgagagtggaatctgactcagggcccagtcagaagtctggacgtgtgtgtcctcacacagctgagtgtgtggtgtgtcttcacacatctgattgtgtgcacatgtgtgtgtacatgcatatacgtggtctgcccagaccaggaccccacagattgggactagttggggccctctgggcagcctaaccacagcaggcagatgatgtccaccct

SEQ ID NO: 52541 - DNA, 374 bp, Mus musculus
  source 1..374: mol_type = other DNA
cacagctaagactggccctgctctgagaggggggacaggcttcagggctggagctcttgcaagtgccacagggagaggagagaggcaccttcccaccgcccaccctgctccagcacgtgtcaggtgggaagcatgaaagggtccaagcatgtttggccagcgtgcttgccccaagacttgatttgcctgtgagccttccctggggcacagaggggaggggcctcagcagcggatgcaggagaggggctccagccccacatcttgttccccaggatgttctgggttgggtaaggggcccaaaccacctgaaggcgggcgcttgcgagccatcgagccgtcggggcggggccgggctgtgctgcggggaggcggtg

SEQ ID NO: 52542 - DNA, 487 bp, Mus musculus
  source 1..487: mol_type = other DNA
ctcgggagaagcctccaggttctcctagagagcatccagaccggagaccccgggccggccagaccggcttctcggcgccactccgggccctgaccggctgggtattccgggaacaagctggacctgacaggccgcgccatgccgccaccctggagctgtgtggcccgtcccgcacacctgggtgcccctctaccggggccgggttgtaggccagtctggtgtgcccacaaagcctcggggcttctggcctcagtttccccaacagtgagggtaactattgctctacccgcccggccaggctcgcggctttgattccggcgccggccctcccggcgcccgctgcgctgctcccgccggcgccggcttctcggggacctaggcggaggccggagaggacgcaagtggcctcctggcctagtctcaccttgggctccaggaggccaggcgtcaccctggtgggggcggggacagcgaccaaaaccttagg

SEQ ID NO: 52543 - DNA, 413 bp, Mus musculus
  source 1..413: mol_type = other DNA
agccagctgcccaagggctcttcactatctcacccgagaatggagagatccgggtggttgcggccgacaggggcagtcccagccttcagggcacagccacagtcctcgtcaatgtgctcgactgtaatgacaatgacccgctgagtggctacaacttctcagtgatggaccttccaactgaaggccgtagatggcggagtcccacctcgttcgtggtgtcaccatcactgaccccgcagacacgtcttggtgacccttatgggctcttccagattggatcacattcgggagggttacaccgcctcgtggtgaaggtcagtgaccgtggcaatctttacgtcaacgagacctccatagcctggacacgcccctggatattgacatcgagcgttccaagcagcgtggcaacattc

SEQ ID NO: 52544 - DNA, 262 bp, Mus musculus
  source 1..262: mol_type = other DNA
gggacctgctgggttctctcttgctgaggacaggccagggcaacaagatactggcaaaaatggaggatttgggatatgatacccagatgaacccctcttcctccagctagcatgagtgggacgcatgggaatgactctcagggtggagtgctccaactggagatgtcccatccctatctagtatcagggtaattaccatgggtacccagggaacgtcagctggggaagggcgtgccccaggcaggagctgctatagacctgc

SEQ ID NO: 52545 - DNA, 404 bp, Mus musculus
  source 1..404: mol_type = other DNA
aactggtgggtttgggcgttacccacgccaggtcccagcaggcggggatcgaagggcatccacaatcttccctccagtgtttgaggaacccgaaatcacggacatttaaagcaagacccttaaagatgtagcatgtttattttgaattttctcctggagtagctatatacagtctcactctagtgagcacttgtctctaggcgctatggcggccttcccgcggatcgcggcgcactgcaggtatgagtccatcgcctgcgggacttcgccttgcagacggccccaggatccctgtcaggcgccacatgtcgtggccagcaccatagagcctgacagggaccagagtggccgctgcgctgtccccagcggccgagtccccagccagccatcagcagccctgccgg

SEQ ID NO: 52546 - DNA, 291 bp, Mus musculus
  source 1..291: mol_type = other DNA
tgttcaggcctggggaagccttacccatgagatggcgtcccaacaggaggccacatgtgacagaatgtcagtctcttacctgtcaaagctgaaactggtgggtttgggcgttacccacgccaggtcccagcaggcggggatcgaagggcatccacaatcttccctccagtgtttgaggaacccgaaatcacggacatttaaagcaagacccttaaagatgtagcatgtttattttgaattttctcctggagtagctatatacagtctcactctagtgagcacttgtctcta

SEQ ID NO: 52547 - DNA, 351 bp, Mus musculus
  source 1..351: mol_type = other DNA
actcgcagctcagactgaccagggcctgtaatcctaaggtattttgagaggagcagcctctcaaaggcttcagccatttgactcaggccaaaccaggattcctggttgaatgagagctgccatattagccagatatctctttggtggttaagttacatcgcaaaaggtctctctgttaagtgaacttatagagtggttcctaggatggaattacaatgttcggccttcacctgaaaacgggtttctggaggatttcctctgcctacagctggaccctcgcagctcctgcaatggcgacagaggacaccttggccgtggcgccgcttcaagtttggagctctcacctcgcca

SEQ ID NO: 52548 - DNA, 201 bp, Mus musculus
  source 1..201: mol_type = other DNA
ccctcctctgcctgagagagaaggtcaacgggaggagcagtgccactgacaccctaggtgtctgtgtgagccatggctagctctacagtaactttactcttgggaccagttcggagaggttaagtcatttgcggcagacccagatgtcgcattgcagagtcagcacagctgctttccaggggtttccataggaaaaagctg

SEQ ID NO: 52549 - DNA, 616 bp, Mus musculus
  source 1..616: mol_type = other DNA
aatatttctaatttttataaatccaatttatgtttcttaaaactatatagctatgcctctcacatttaaatatctgctagttagttagttagttagttagttagttagttagttctagccctggctgtcctggaactcactctgtagaccaggctggcctcgatctgcctcccaagtgctggaactagagggaattagagacatggatgtaattttaaatccagctaattatgtcaataatcattgtggcttttagtaatgtgttgaagctgagtctcaatttcctatgtaatgtacatatagctctaagcacagtgcttgaagcctcgataaatgcagcagttaaaaaatgcagtgagttaatgcgttattaagggaaacatggaacgctggatgcagcattcacctcaaggtgtgaatcccaggaaaactctcgctcttcagaacctacgtttgtacaaatttgagggtttgaagcttgcacattctgtaggtggaggctcctgcagcgaggggccacggcctgtagagggcgcgcaggagccagccgcgctgagggcggctgcgcagagcccaccctccgctggcatccgcccctctcagctgacagctctgg

SEQ ID NO: 52550 - DNA, 691 bp, Mus musculus
  source 1..691: mol_type = other DNA
tatagctatgcctctcacatttaaatatctgctagttagttagttagttagttagttagttagttagttctagccctggctgtcctggaactcactctgtagaccaggctggcctcgatctgcctcccaagtgctggaactagagggaattagagacatggatgtaattttaaatccagctaattatgtcaataatcattgtggcttttagtaatgtgttgaagctgagtctcaatttcctatgtaatgtacatatagctctaagcacagtgcttgaagcctcgataaatgcagcagttaaaaaatgcagtgagttaatgcgttattaagggaaacatggaacgctggatgcagcattcacctcaaggtgtgaatcccaggaaaactctcgctcttcagaacctacgtttgtacaaatttgagggtttgaagcttgcacattctgtaggtggaggctcctgcagcgaggggccacggcctgtagagggcgcgcaggagccagccgcgctgagggcggctgcgcagagcccaccctccgctggcatccgcccctctcagctgacagctctggagacggaagaggcggtgccaggtgctgcggctggtctgcaggcctggccggcaagcgtctgccgaggcccagtcaaggctgcggaactttagggcccggctcggctgagcggccggaagg

SEQ ID NO: 52551 - DNA, 675 bp, Mus musculus
  source 1..675: mol_type = other DNA
gaaaactctcgctcttcagaacctacgtttgtacaaatttgagggtttgaagcttgcacattctgtaggtggaggctcctgcagcgaggggccacggcctgtagagggcgcgcaggagccagccgcgctgagggcggctgcgcagagcccaccctccgctggcatccgcccctctcagctgacagctctggagacggaagaggcggtgccaggtgctgcggctggtctgcaggcctggccggcaagcgtctgccgaggcccagtcaaggctgcggaactttagggcccggctcggctgagcggccggaaggcgcgaggcagagccgagtgaccgggcttgccctgtggacaccgggctctccggcccggggaggagcgaggcggcccgctccgtgggcgcctaggggacagggcggggcggatgggccttgcgcctctggcacgccccggggaccgttcctccacgccgttgctagccccgggcctgtagccctgcgtctgcatggcgattggcagacggcggggcgacaccccggctgaccccagcgccagcgcctgagcctgcagggagtggcttttcccaagctaggaaaacccgtagcttaattaaattttgtccagaaaagagcccaggctgtcatctgtctatttttgattaatgaagtagtaataaga

SEQ ID NO: 52552 - DNA, 394 bp, Mus musculus
  source 1..394: mol_type = other DNA
cctgtctcagaaaaccaaaaaaaagtatttgcttctcttgtggaggatacacacacatacatataagtcttttaaaaaagactatattttgtttggataaaacaaagttcaggatgaacctaagaatgacaagggcccttcttactcttctctctctgcaagagacattagatccctccgagagacatcacaaatgaatgccataccttttaaaagtccttttcaaggtctaaatttctgtgcaccccacgccgggctgaggggagcagcggccgctcagtcagcagtccacaggaggccacacctcgggggccccaggcggagccgccagggcgcgtaggaccgccctgagtcagctggcggcgcgcgcaccccgtgaccggtggccacgtga

SEQ ID NO: 52553 - DNA, 588 bp, Mus musculus
  source 1..588: mol_type = other DNA
ctatattctattggttaagaaagctggcttaatagacttgcattccaactttccccctcatcggctcagggtctgtgagtaaaacgaaccgctgcttataggaactcctacacccagctccgagttaggcaaggctagctctctcttgcctcagcacctatctagataaatccttcaagttttgacctgtaatagagtttctgtatcaacagaaaaatctaataaaaataacctaatcttaagattgttcgaggccagcctggtctacaaagtgagttccaggacagccagggctattcaaaaaaaaaagatttaggatcagcaattactttttgtaaagggtaagtaagacatagtctttagagtttgcagtgttataataaaactttatttgaggatatttaaatgtcaatgcatacatccaactggcgggatgaggcccctgccctgtggctgcctgacccggcgacttcagcgactccggagtagctgcggcgggggcgaggggcgcggctgggcccgggcggaggggcggggcggcgccgcgtcgtcgtcgtcgtccccgcctcctccccaggggccgcggcg

SEQ ID NO: 52554 - DNA, 357 bp, Mus musculus
  source 1..357: mol_type = other DNA
tgagggccaggcctctgtcgccccggggggttttgaaatagacaaaggacattttcttaatttttggcaaacgtggctggaaggtccctgcccccgacgtccccaggtccccagtaggggtcctctcgctccccctccccatcgcctgcggtgacaagagatacgcaccctgcgcagagcccaggatccggaggccgcagcgccccccacccccgcagtggcgtgaaggtggcctttacctcctctcgcaggctgggaggagggtacaacccacgcagctaagccagctgctgcagtcgccgccgctagcgcatgcgcgcacggggtcacttgtgccccggcgcgcgtgcgcactgg

SEQ ID NO: 52555 - DNA, 385 bp, Mus musculus
  source 1..385: mol_type = other DNA
ttgtccgccacgcagagctggcaccgtgggcacgaagcccgggggtgggagagctgcctaaacctagggcgcccccccccagtcccaagcggtcgctccagagcgagccggggctgcgggttccagccccggcttggcaatgcctggaacggcagtgccatgctgtgaacacccccagcgccgtgccggccgggcgcgcctggtagctgtggcgtaccgcgcaccactcgcagacgtcagtcggaggagccggcaaagctccctgagccctgcagcgccagctccgcgctgtcagctctgttcgctgcctcagcggcgatgttgcaacccttgccagtgcgcacgcgcgccggggcacaagtgaccccgtgcgcgcatgcgctag

SEQ ID NO: 52556 - DNA, 289 bp, Mus musculus
  source 1..289: mol_type = other DNA
ctgatcagccctggctgccctggtttaaaggtgtacaccaccactatttattcttggtaggaatattgaatacattttcataagtttatttcccagtattaatacagtaatagaatatgatcacaatagattatgaatttatatccataggtccttatatattctatgtgtttatgaactgttaacagttgtctaaatctgggaacagatctgtggtagagcacttgcctggttctatagtcaggacaatttttatataagtattcatgttcataatgattctgagaca

SEQ ID NO: 52557 - DNA, 446 bp, Mus musculus
  source 1..446: mol_type = other DNA
cactcatgcctcccaggctgaaacgcctgtggaagggaggatcggaaacataatcatggtttcatccttccctttctatggtaagaagaggcatgcagggcccactgaggaggtcccaggctcacctgcggactctcctaggtaagggctcccttttaccagcagtgtgattgagtgtctttcaacacaaccagttgtttctggtgacagagaggcctcaaaataaacaggactctgctcagacattagtccactgggctcggacttctgtctgcagtcccaggtctgctgcagactgtgaagagctagaggcagcaggcaggggaggggagccccctctgctgatgagcaagggccaagggcagacctggaggccagcgctctcggctccctctggaggcgggccagcaacctgatgtgcatgccacatcctgaggctcagagag

SEQ ID NO: 52558 - DNA, 315 bp, Mus musculus
  source 1..315: mol_type = other DNA
agactcagcctgggacaaactgaaggttgaattaaagggtgggattcatccccaaagcttttttgttgttctcgttgagaaggcagcagagctctggagtcagacagtctggagcccgcacctcaaccttcctgaaggtatggttcggactttccgaatcgcagctttcctcagtgggcatgccagcaggtcaagtactactgtttcaactctccttcacggtcagtgaagaaaaaatggacttcaatgctatctatgtcccacaaacctaggaagcacacttagtacccacatccctctggggaaatgagcata

SEQ ID NO: 52559 - DNA, 402 bp, Mus musculus
  source 1..402: mol_type = other DNA
cagagggatgtcactcatgaagacagcgcatattatctgttcttaaacactagtcgctgttctagtggataggattgcaacaccccaccagagaactgcggaggcacgtgccctcgtggtaaaaacggtgttaaagaagcaaatacgttctagggattgcgagctccgagcgctcagtctggctcgggggggcgcacccactacagaatgcagcaccactctctctcctagctctgcaaccttcgctgagcaggagggggcggggcttgctctgcggacccagggggtggcacggactccgcccctctccccgcggaagggcagggcgtcccctggcggccccgtgggtcgggccgaggcaaggcaggttcgggcggcccggacgccggaggggcggctgag

SEQ ID NO: 52560 - DNA, 494 bp, Mus musculus
  source 1..494: mol_type = other DNA
ctgctgtgtgcagtactctattaatgtagggagctagtcagattgagtgcatagttacccctatttaactctaggtaaactagcaattacttatattgcaaagctctttaatatccctcaagatattataatgggggttgtattttatataattcttctctattagcagaggtagtaggaaaccaccaccaccaccacccctgtatgtgtgtgtgtttatttgagggatttttaagtaaaattcttcaaactactttccaaattagcagggtttaagattttcaactgtcctttaaaaactagctatagcctctggatttggctttcaagccctgcagtggcttgcctgagtcacaggcttgaagtggcttgccctgtgagtgaaacaccttcagtgagcagaggagctgtggccctgccttccccaggccaggggtgttacctgagaccctgaggaatttgtgttgcgatcccaagactggagagtgatttct

SEQ ID NO: 52561 - DNA, 406 bp, Mus musculus
  source 1..406: mol_type = other DNA
ctccgcctcacctgagaccaggctcctcctcggccactagtgcacactgggagctggggtatctccagccccacgagcctctcagagtgtgaagataaattaaatactccatcagatgacttggagaaagtcacttgtgacagttagatgtcattctgacctgtgaaaagtctgcagactgctaagagtagtcagttcaaaattgacaggaaagagtaaatttaccctcacaaatgacaccacatgacggcctgtgatggtcaaacttttgagctgctgtgttacagcagtgtagcatgaagtagtgacacacagatagttcagtttcaagtccagaggacgtgtaacaattcttaagggcattctgataacgtgcagagagtgctgtcaatactcattgacaaag

SEQ ID NO: 52562 - DNA, 239 bp, Mus musculus
  source 1..239: mol_type = other DNA
aactccatggtcttggaaagctacatgagtttccagtgtaaattcataaacaataaagcactaacagcctgtgcggagaaggttggagatgaaggctttctgaaaatgccgaccttcaacttaaatttgaaggtaagaaggactcttccagcttaaactttggggttaaatgaacatggctatgtaagtctctgccgccgcgaggacttggaaggcatatttttcctctgtgtgtttac

SEQ ID NO: 52563 - DNA, 493 bp, Mus musculus
  source 1..493: mol_type = other DNA
gagatctccaagaggtcaggcagaggagaccgccctcggagtccaagtgctgaatggggtggagccacggcagcctcagctccgatcagaagtgccaagcgctggcacctgtgggggagcaaaagttacttcctcgcacccaggcccctaaaccgtagcgtgcggcgcgaggtagggggcacggtcccagagtcgccccagtctgcccaaaggggcgggcagcttaggggcaggtcccgcgcggcggctgcactgtcacccccacgccgggaccggccacgtgtttctcttggagacccggggctcgccctggggcctccgcggggagcttggatgctggccctcttttttttttttaagtgcaaagaaacccagcggaacttcctccgaatgtgagcgcgctggcaggcagggaaacttggcaggcggcgcctcctgctgccgccgccgccgctgctgccgcctcctctcagactcggggaagagggtgggg

SEQ ID NO: 52564 - DNA, 733 bp, Mus musculus
  source 1..733: mol_type = other DNA
ggcgcctcctgctgccgccgccgccgctgctgccgcctcctctcagactcggggaagagggtggggcttctcccggtggcgagcgagcgcgcgcgcagcggcggcggcggcagcggcggcggctgcagacggggccgcccagacgatgcgggggtgggggacctggcagcacgcgagtccccccccgggctcacagtatgtatgcgctgacgggcgtgtctgccgtcctgtcccgagagcggccagggctctgcggcaccggcagttggcggacgcggaccacccctgcggctctgccggctggctgtcaccccctcgggggctctggcggcagacccacggggcgggctcccgagcggttccaagccgcggagctgggcgggggcgcagctttttttttttctcgtccctcgggtggggaaaaaaggccaagaagccgcgcgcgccccggcggtggcgatgcccggagccgcgcgggcttgcaggcgccgtcggggccggggctggcggggcccgcgcgctgggcgagaagagggcgagggccgagggcgcccttgcagttgccgacagtcgccaacaggttgcaccgttccccgcggccgccgcgcggcccctcgggcggggagcggccggggggtggagcgagtgtgtgcgcgccgtggcgccgcctccgcccgcccctcgctcggtcccgctcgcctgccgcggccgggcggccctttcgcgtgtccgc

SEQ ID NO: 52565 - DNA, 525 bp, Mus musculus
  source 1..525: mol_type = other DNA
caagtcttggcaaatgcctttaccttgatgtgaaagagccacaatcagcacagttggtggtgactcgctatctacagtcaaaatgaattgcatctgtctcctaacaaaggatgctcttgtacaatacattgctctaagaaatgaaaatagaaacattatggtccaataaacattttattttttaaaaaatacagaaagtattcctttatttattatctaaaaatatctccagcttttagcagctactggattacatattgagaaactgtctttaaaaataagcctcaatacacacatgtataaaggcaaaaataaaaataagtttttcttaattctacaaagactttaaaaaaaaattcagtgtttcccctgaggttgactttcaattttatgttcttcttttataaaaataatgaggtgaaacatctgaggtccacatgtccatcctctcctagcagggtccagagagcttgctctctggccagccagcctcgctcccaaggcagcatgcaccttgtaccgcgc

SEQ ID NO: 52566 - DNA, 269 bp, Mus musculus
  source 1..269: mol_type = other DNA
ttcttatcagagatgggaggcagccaggtgagtcaagataatgacttactgctaaaactcctagttttttaatccaaggatgtttttaaaaattacaaacacttgtaacttgaacatccgaaggttttttttttttttttttcaaaagaaaatcacagccaggggctgggggcccctgtaccgtgcatctggtcccgtgcccaccgcgagcgcacgtccccgtcagtgctggcaacctgtcaccgccgaggacgtgacctttaagatga

SEQ ID NO: 52567 - DNA, 697 bp, Mus musculus
  source 1..697: mol_type = other DNA
aggaaatgaaaattttcatgaagtgtttttgcttgccagtcttttatatacattttacaacaaaagttggctatgctgatactatagtttccatagcacaggtatcggcatactttaaaaaagctcctcatataccctttttcatttttttctttaacacatacatagaaatattaatatgtatgcatatacatgctataatgccttagctgattaaatattgtaaacaaacgcactcattgatcaaataataaatattacttcttaggtcaaataaataagactgagtttttagataaaatattagcaattttgtacaatgcactctgtacgcaaataaatggtaaagactttttgaatgagacaatgtaacaagccttagacagttcccacagtgtggaaacttatatactcacagtaatagttgctaatgagtatcacttagtattttctggtgacagacaatactacagaaaatgaactcatttatttactcatttaaaagcaaagtcattcgtctgtaacgactaaataatagatataaaatcctcaggggccgagtggcccagcattccggtccttccttctgccccttaggagaaaaccctctttactagccagcatccactgttaacccggctgccggaagcaggttccccgaccgggccgcgcgaaaccggctagggcgcctgcgcgg

SEQ ID NO: 52568 - DNA, 263 bp, Mus musculus
  source 1..263: mol_type = other DNA
cgtaacttaaacattggggttttgaagttgaccattgtctgaatcaagtccagcctggactgtgtagtaatctgtcttagagagccaagggcttgatatgccaagtgaggacagcatggcagaattaactaagctggaataacttcttttatctttgcaaagtgttttcaatattactgtaatttgacacaaagtaggtaaaaaatacttaggaacttaggtaccagactggggctcactccggaacataaggacctttgttt

SEQ ID NO: 52569 - DNA, 237 bp, Mus musculus
  source 1..237: mol_type = other DNA
acctaggacccaacgtgtgtaacatttgctgcttctagcaacagttgctctttggaggaaagaaaacacagttcttctgtatccttaacccaggaacttccaggagttagactgttctgggagaagggtttcctgcaggccagaggcccagccctctgcggagggctgtagcaccacacccgtagttccagggccgtggaatcctggctgcaaatctcacggttgcagggtgtaact

SEQ ID NO: 52570 - DNA, 337 bp, Mus musculus
  source 1..337: mol_type = other DNA
tcagagaatatttcgggactgtagacttaggtctgttgtcacaattagaaatgaataagacttttattacatatatgcataactactgagtcagttacctgtttgaaaaactgatatggctttagagtcacatggacatgtatttgaatctccttgttagattatagttactttgggtaacaataacaaggcaattgctaattgatcaaatgcccaaccttgaagggttggcacccatcatttaagatggagtcaggggttatgcttgagaccagacagagactttctccagaacctatttaaattaatcatatgcaggaggagagaaaataaaatg

SEQ ID NO: 52571 - DNA, 464 bp, Mus musculus
  source 1..464: mol_type = other DNA
tcgtgtgtacaccagacaataccaacatagtattgtctcaaatgtattgagttaagtttatttctttatgctttttgtttcactcgactaacagaatttaaaatagctcagaatgtatttctattagcaagtttgttgaaattcagactaaacattactttcattgcaccatttgaagataaattatctcagtttgttctatttcaagacttgataaattccagaagttctgttgcagaaacaccttcctgggtgttatttccaggaagtgtccattgtaaagacacactttggatacttctgtatccaaaaggagaaggctcatttgagttcaagaaaactccttcacttccccccatttgtaactgaaatatagggttcaatacttctatatggatcccttaaagacagcacttaagtactgtctttgggcatgtgctgtctttaaaaaaatacaatgtctc

SEQ ID NO: 52572 - DNA, 466 bp, Mus musculus
  source 1..466: mol_type = other DNA
tagctagattttttttttttttttaaagagagataaagaacagagcagacacatttaacccatacctggggtgttaagtgatttctaaattgttactagttacaagaagatgttgacagagctttcttcttcatatcatacaccaggtatgtattataccataattgaattttatatttctatacaattacttgtgaaaaaaaattctctagtactgttggtaaccaagacacttaatgtttactggattaattgatattaatctgaacaccagagagtaaaagctatttctcatcaggtctgttcaatagaatatttttcgtgctgatggaaatatttttgcacatttgcacatagctacatacaaggaatgccaccggtaataataaattgaatgcgcttgaagcagtccatcatgccgaactgcatcacggatcttgtagttcaactttgttggacttcaata

SEQ ID NO: 52573 - DNA, 298 bp, Mus musculus
  source 1..298: mol_type = other DNA
gccctggccctccagagcactggacacttggtttcaggcttcaggcatccgaaatgaaactgtttctaaagccaggattgttttgggattggtgaatagaaatttgtcttgtacattgctagaacaaaatccttagtctgagttaagactggctatgttctaggcaggagaaagcggacagttttctctcctgggcctccactcagaggcaatgagcagtcagtcactgtgacactgcagcacggaatgagtcatttgacgctcccggaacaaagacttgcagcaggtgggacacacc

SEQ ID NO: 52574 - DNA, 358 bp, Mus musculus
  source 1..358: mol_type = other DNA
tgtaggaacgttggtcctatacactaacaatactttttaaatattgagtgctcaatacttttctcattatgttattattattattattattattattattattattattattatcattgcctgcagaagacactggagaacttggcccacaagttctgtttctcagaacaggcttgtggatcaggaagcctcagactcagagacaggaggccctgccaggccgggggcggccgcatcaggctcagagtggcgcgccgagacctgcggtcccgccttgcctcccgggccgcccctgcgagtcccgggcgcgtgtgcacgtctgcgcgtgcccgggcccttcctggcagactgaggggag

SEQ ID NO: 52575 - DNA, 429 bp, Mus musculus
  source 1..429: mol_type = other DNA
ttaaatttttatttatttatttatttatttatatttccttttaaatgatgtttgctgatgaaaattcctcctgaaaaaaaaaaaaatattgacatttagagcacacacacacacacagagagagagagagagaaaaaaaatagcaagatcttgcttcttggcattatgtccaacataaacgcaccgcacgttgtgttgcagatttactacagaggggctctccgggttccccgaggcactcccagcagcagacaccggtactgcgggcggcggtggcgggaccctttaagagacacagcaccttctctaatgttcaacctaccttgctaggtccctccgccctcactgggtacggcttgcgggcggggcgaacgagtcttacgattggccttctgcgcgcgtcccgcccacctgggcctccgggctagg

SEQ ID NO: 52576 - DNA, 495 bp, Mus musculus
  source 1..495: mol_type = other DNA
atttactagcttcatatattgggcaagtaatttaacgtgtatctcaatcaatagccagtgtttagaatactgtgtagtgtatacacacacatacatatatatatatatatatatatatatatatatatatatatatatatatataaagtctgagtaaaatttatcatcattttgggtaatgacagtggtcattttcactatccttttttattttaagttaaaaatatactatatttataattacttctgtgaaaagctataaattgtagaggcttcccttctccaatttacttattttatatttacttattttatttatgcagtaaattatataacactttatgcttgtaattatttaagaacaagcatatacagcatagtgatttaacctcttgttaattggctgctaattggtttaggcgtgacccagttcaatttcgattggttaggctccacaggtgcgtgggattgacgattcccccgaccaattgggaa

SEQ ID NO: 52577 - DNA, 307 bp, Mus musculus
  source 1..307: mol_type = other DNA
tgtgtgtcacagggcccgtagaggacaggtcattagggcttacaaagcaacaactttttaatcaggactttaaaaatgatactttctttcaaatctcttaaatgtcttcaacataaaaattctgagaagtcgtactagtatataaaccagttcagatcgaaaaattttataaaagactcaagtcatccatatttggatttaaaaatacagttgttcctggaacgcactggttcttcttaaagtgtggtcttgcagtagcagcagcagcaccccttcaaaggacttgaatcagccttagtctacatga

SEQ ID NO: 52578 - DNA, 383 bp, Mus musculus
  source 1..383: mol_type = other DNA
tatattcaccctgtctgcgggcatagactgtgctctgcctgtggacagggtaccactgcccggcggtgcgggttctgatctgctttctagtccaagccggggggctaagctgtgaataaagctcaccctttaacttcagctcaaggggcagtctctaaacactgtcctgaatgaagtgcaggcaggtgagtgagctaagggcctccgtgcacaagccagcccctgcccttggctgtatggcaccagagggggtgtccttggctgccgcttgcacccctctgcagcagagagcagccacagcctctgcctggactcccactgctgctggggaagagtcccggggctgctgacgcggttgggaggagcctcgcctttaatgcacc

SEQ ID NO: 52579 - DNA, 182 bp, Mus musculus
  source 1..182: mol_type = other DNA
gaaatacagcacaaaggaccttcgaaatcctgagctgcagccctgtgcttgaagttgaacacagaatctttctgtgttaagaatttcattgcactgtactttaatataaataggagaaggcaggactgacttactcagcaatcctgctcggagaagcttcagccaatgaagaggctctatcc

SEQ ID NO: 52580 - DNA, 446 bp, Mus musculus
  source 1..446: mol_type = other DNA
tttatttatttattatttatttatttttaagaaaacattgttaaagcttgcaaacgtttcgcagtaatgggagttttaacctcaaagttcgcctggcagctgtcacaccagtcatttctgaagaaagtgctaccaccagcaggtgcaatgcatggaccatcctcaggggtcaaggtcgaaggagttccctccaagtattaccttgggaaacattttcccctgggtctgggatgaggaatgctcagtttcaggctgctagagatggagcctgtgcccggggttcccagccacctcctggggcgctcgcagagcgacgcacagtcccctggcgactggctctaatccaggcgactggcaattcgctccgggggagggcgccgtctggggacgcccctggcgggctgcttggcctcacccgggtcctgcccctcgctggggagctgcgc

SEQ ID NO: 52581 - DNA, 257 bp, Mus musculus
  source 1..257: mol_type = other DNA
gtgactgtccagcacatgtgcagggtttctaccctgctgctcactcatttaaaagtgaatttactttgcattgttaagtgcatactgatacagacaaatatcctaagagcagcagaggcgccgcccagtctttggttctaacaaaggcggcggcaccaccggctgcagcatccttgccctcgcgccctctggtggtcgaggagctctctggcagccgccgcgggagcccgggaggggggcggaggcgagaggaggcg

SEQ ID NO: 52582 - DNA, 401 bp, Mus musculus
  source 1..401: mol_type = other DNA
ttaccagtatgaaaatgttatcggaaacactttgcaagataagatctgggaaataattacgcaattacttttataattgccagcgaagtaagaggatttcctctctcccccgcacgtgcatgtatatgcgcatattggtgcgtgtgtaatttgggcaatttgctttgtgtccacgaggatcaaaaagtaggagtgcaaataaacagtttgtgtgcctgtggtgtttcagtttaattatttctaagacaatctgaattgtatctaagtattatggcagctggagcgggcgggcggtcccggtcccgggggcgatcggagcctgggctgcggctcactagcttggctggtgggtgacaggcaggaaccggagcagcactgccgcctctggcgcgaaggctctg

SEQ ID NO: 52583 - DNA, 376 bp, Mus musculus
  source 1..376: mol_type = other DNA
aagggcttttcaaattctagtggcatctataatttatggctagaaacagtattgtcaatatcgccaggtcgttttcaggagtgcaaaaatgatctgagaacaaattttcaattaacaaacaatctctcacataattttttagtttatttcttccaatagaaagtgcaatatattttatctaaaacctatagacagtacaaataaatgccaaactgttcggtatatttcaacctataacttagattcgacttggcgcctctcaaggcgacaaagagcatctcagagtcagggacttagtttgccacttgcaattggctattgccatgacaaccagcagctgccgggccggctgcttctaccgcagcaggggtgggct

SEQ ID NO: 52584 - DNA, 525 bp, Mus musculus
  source 1..525: mol_type = other DNA
tgtttatgcctatatacttttaatttctatcctttaaagcatcaatataaagtcattgttgtaataaagaaaactcttgataaatctagattcagcgttagccttgtttgtcttcataattattcagttatgaatatatagaaatattctggtcacaccactaaatgacttgaaacggtgacttcttccagcttaaactaaaaagaatgaagtaggaattttccattctctaaaaagtgagaatttcatttcacttcctttttaatgatctctttcatattaatagttcaatacatttttagataagtttgttatcactgtggcagaatatctcacacaaacaactaactaaagattgttttaagatcatagtttgggagaatttcagcccatcacaaaatctgtgacttcttcatggagtggacctatgacacatgtaggtaactagatgtttgcaaagatgacaaaatttgactgtcccagcctgccctgcgcgggccaacgagagccagcccagtgactcac

SEQ ID NO: 52585 - DNA, 423 bp, Mus musculus
  source 1..423: mol_type = other DNA
ctaaacagaaattgtcttgtgctgttaggaaagaacatcaaactctttttatatgtgcctttatttttctagagagaaaaacaaaactaagttcattggtcaatactgtttattatacaaacaccctgggaaagataatctgtctgaaacaaggtgacagagttttttctaactcagtacacattggttaataaagaatcaatcctttggattatttactaccattattttaattttccaatgcataagttcaggcaataggaaagtgaaccaatttcctagaggagaatggaaatcctgtttgagttctgcatgtctgcccatccattcagaactactgaagcctcaccccaggaaggctttcctaaaagaggatgtcaggaggaagaatttgggtccaaagttttctattatagggcacag

SEQ ID NO: 52586 - DNA, 361 bp, Mus musculus
  source 1..361: mol_type = other DNA
tggttatagaatttagtaacagatgatttatgtaataattctaatttggcatacatactcctttgcataatttatcagatctttaaagcaataccatagatggagttaagactaattgcatttttttaagtgttggaaattgtggtcatttcagaaaccacctggaattcgtgtcccatggctgagccctgggttccagaagggcagcgctcattttcccctggattactagaggacattaggaaaggtaacagaaggccttgtcttcatcaatatgtgaatattgaaaatcttagaagttcaacaagccttctagggcttgggaaagaactactttgtttctcacgagaatgtgatgaaa

SEQ ID NO: 52587 - DNA, 374 bp, Mus musculus
  source 1..374: mol_type = other DNA
agtagagctatcatacagcttagctgtactcttcttgggatatactcaaaagattgtatgtgatatctaggagatgaaaatatattattaacctccaaggaaaagaaattataaggtagaatattgtattaataaggtgctttacacagggtcccgggccccatatttgaaatgtaaataaagaaaatatccaataaaaatttttaaaaaataaggtgctctagtctagaaggacaaaatcgcatgttctttcacatatgcaaatcttaacttttaatgtttacatgaatgtaaatgagccaaaacaaaaaattaaactcaattgctttgattttgaaagtatgtcttgtgcatttcacagcaggtgatgtcat

SEQ ID NO: 52588 - DNA, 539 bp, Mus musculus
  source 1..539: mol_type = other DNA
gtgcagagattattaaaaggtctttgctttcgggacttttctgtatacatggaaactctgagaattactgctttttaaaaacattactaggaaaaagggttatattcatgtatttatattctctaattacttacttattatattttttcattgaagtaaggctaagtaataaaacaatcaatttatttagcatagagtataattttcatatcatgggttattgaaagtttaatcttgaatctctaatatttaagaagattagcatctctcacatgttaggcgggactacttcagcagtcctacaagaacgtttaaaagtagttatgtacaagacctattttcacaaagtttctgctcttacctatgtgcacactgaaacaactttgtagctgccgtgtggcaattaagtcacacacttctgatgggtaggaaaaccgatctgttctctcttccccctctcacttatgaagggaagtcaatgcctggtatcgggtattataaaaatatattactttcagaaatagatactatctgcttaa

SEQ ID NO: 52589 - DNA, 429 bp, Mus musculus
  source 1..429: mol_type = other DNA
tacatgtatggagtatcttaaaattctaaaaataaacaagaaaattgaaatatcaattattcctcccccttttgatgttaaaaagtcgattgcacagataatatttgaatctttcaaaatttcagactctgaagagttttaactaaaactcttcaatgaatttgtacttcaaatcccaagagtctactactccaccttaagaggtggattaaactattagaatatatcttagttttgagagcttttcaaacataccaaaacccatgaggaagaatttctcaaatttgtgctatagatgtacaaatgttctaagtatggctagttgtcatccaagtgcctggatataaattcagataagtttcaaattgtcctatatcaacagaagttcacaaaataaccatgctttatctgtccttcagtcacatttat

SEQ ID NO: 52590 - DNA, 520 bp, Mus musculus
  source 1..520: mol_type = other DNA
tatatttactggtattttaattagcacattatattttgaggcacaatttcttgtctctgtaaagagctattacatcttacatttaacttacacagagatatctttccaaatgtttgcaaattaggctgtctacaatagcttcaatttttagcttatagaattaaggaaatattcaatatgctctagtttaaattctcaattgagtaacttttcactttttaacaaagtaaaaataatacattttggttttttatttaaaaattagaaatcactactatttggctgtgatggagatttttaaactaacaagcttataaatgttcattttagaggagtagaactcagcctgtgactcactcctttaatgtaggaaaatgtaggttactagaagaaaataacatcctccattaataagatctaaggtgcgactcacataattgttttccttcttaagattgatgagactcacgaggcatttctttaaataaatgcctaataaagaaggtggagatccatatat

SEQ ID NO: 52591 - DNA, 327 bp, Mus musculus
  source 1..327: mol_type = other DNA
accaaatagcttattaaatctacctgtctggggcatataaagtttgcaagtccaatgggcctcgccaggcgacaagagctccggactgtctttgctaggccccggcatagtctcacaagagagagctatatctgggtcctttcagcaaaatcttgttcccatttctaagaaagggtaaagtatccactcttgtacttttcaaattcttctttttcatagtataagacaaatccagataactttcaaatcatcctatatcaacagaagtttttctggacaactattgctatagtgagaacagagaatacctatcttttatctgtgcta

SEQ ID NO: 52592 - DNA, 665 bp, Mus musculus
  source 1..665: mol_type = other DNA
ggccacgtattatttgtgaaatactgtaagttccctagtagctaaaaaggttcattgttaggatctgatgtagattagactgaatcttgaacagaatgccaatcttcaggaaagaatatctgataaaaaattaagaaagaaatttgtgagtcataaaacctattagccattatagatataacatttacttgtgacatttaataggactactaaacctagaataaccaaaatttgaataaggaatagtctcctaatgatatttcaagtataaaccattttcaataggcaatcaattgttactttcaaagtcatgtttaaaaattgcatttctatctcaggatcatgattctgctcaaaaaaaaacccttttaatttatctttttctaagaaattcaatgttaatttcaattcttagaacattttattagttataaattatggcacaatatagataaaatccatctattgagtaaaagaaaaatgtctacaactagctactaatgtatactaataattttccagggacttataaattaactttaagaattttacaaagctactcttgtttgaaaagcgtcactatatatctgcagacactagaaagtggcatttgtgacatttttttcacattgcttaagcagctgtagctatgcttcactgctgcc

SEQ ID NO: 52593 - DNA, 346 bp, Mus musculus
  source 1..346: mol_type = other DNA
tctgtagttatttacatgcctgcacaaaaatgaaaaccagacttaatcttatttatttggttgatgaagggttttaaacctctgaaaataaaagatcttgtggatatatgccaggcatccagaaaacttactaaattaaatgactctttcgacttaggtggtgcacaaatcaatttgcattactgaatacatgtaaaacacaaattttatgagcttgcttgctagcttatagtcaaaactcatgtctaaaatagaggctctgaaatatcaccaagacatctgagatattgttcagattgtggtactttgacatgccagcatacatcagatgtcagcttggcagctg

SEQ ID NO: 52594 - DNA, 227 bp, Mus musculus
  source 1..227: mol_type = other DNA
ttaagcggcacgggtgacctttgagtcaagttttataggtttatattattcctcccccaaaaccctggcttttgggggagtccaaattctggcaggaaataaagttccccagggagcaggtcattcgtctctacccaggaaggaacctgggaagcaagtgagaggtttagtaaccaaattagttgcccagactcttcttttctaagcctggggagccgaggcaccga

SEQ ID NO: 52595 - DNA, 262 bp, Mus musculus
  source 1..262: mol_type = other DNA
ttttcagtgtgtgcacactgggaagagaacaaaatttggatttaactacttgaagacattatcttgcttttaggagcgccaaaaatttgttagaggccagcctggtctacagattgccaacaaaaatgggattaatatttcttcagagaagcgtgtgtgcagaatgcttgctgacagcaatcgcggacaacccccacgtgttggcgaagcgcgcgcaggcgcgactcccccagcttgacattgggcctttcacgcggagggg

SEQ ID NO: 52596 - DNA, 158 bp, Mus musculus
  source 1..158: mol_type = other DNA
cgtgatcttcttgttttcaagctgagtacaagccagggtgatcacccaaggcttggaagacttttaactttatttagaaaagactagcttttctaattcatactccacaagaacaaggttctgtaattactatagcagagacctggaaggatgcctgc

SEQ ID NO: 52597 - DNA, 391 bp, Mus musculus
  source 1..391: mol_type = other DNA
cgaggtaaaagagttaaatctttatttcgggtaatcgagttttcaatgtgtctcagaatgaaagatatatactaaaaatgcggggaaaacccttgtttccagcgcgttcgagcggggtcgtgaggaccagcacccgcacagccagcgctcccgcgttctggggtcgcgcgcggcgcgccctcgtgacgtcatcacgcgcgcgcccgcccgcccgcccgcagcttggccggccaccgctgccgtgagcggcgctttcccgccggtcgcccccggcgctgctgctcgctggcagcaggcctggccgctcccacgcggagcgagcttctcctcagggccatgtccaggccgagcagcgtctcgccgcgtccgccggctcctagcggaggcggca

SEQ ID NO: 52598 - DNA, 353 bp, Mus musculus
  source 1..353: mol_type = other DNA
tgtgtgtgtgtgtgtgtgagagagagagagagagaattcagagaatttatgaaaattccttactgctggaagccctagcgggtgagctccctgcagcagctggaagctgatctataaatgcacggggcgagaagcgccccaggagctctgcgggcgggtgatcccgggctctccccagagcgggcgcacgctccctgcctgggaaagcctgcaggcaggctgcgcggcgttaacccctatggcgccgcgctcgctgcgtaggtcctaatttctccattgagagcatgaaaatgagacttcaatccaaaccttaaagtcaaaatcatctccaaatttggtcttgggcaagaaca

SEQ ID NO: 52599 - DNA, 398 bp, Mus musculus
  source 1..398: mol_type = other DNA
tttgttctgagaactggcaagggcttgccacattcactgttgtcctgaagacaaatgataactgttgaacactaataagatattcaagtgtttttaacatgctaggaaggatgaacaaattaattttgaaggctgtaaatcagtgttctgttggctgccatctaggcaattcaatacttgtgcagaagagaaggaaaaaaagaaaagctactcaaatgcgcctttattctttccatgtgattcaccagaaagtcttttcagatctcaaatgctatcttcagcccttgaagagatgtcttcaaaaattaaatcagtgcactttagttctctgcttaaaattaaatctaaacatgcagctaatcagtatgtgcagttatttgtatgtacatatatctatg

SEQ ID NO: 52600 - DNA, 204 bp, Mus musculus
  source 1..204: mol_type = other DNA
cagcctggccgtacgtcctctttaaaggaaattgagcactgcttagataaaatgcattctggtaaacagtctccaatgaataggataatcagtgtatacagtatccaaagactgttaagccctggctctcctggaactcactctgtagaccaggctggcctcgaactcagaaatatgcctgactctgttgggattcttaatttt

SEQ ID NO: 52601 - DNA, 428 bp, Mus musculus
  source 1..428: mol_type = other DNA
ggtaggctgccttgttctgttctgccggtgcgcaggaagcaggcgaaatgcgcgattccaatccttggccagcacccagggatgcaatccctgctccccccggctgtcccagtgacaccgggctcctgcgtggcgtgaggcgccaagcccgggtgagaagactggggggatccacccaagaacttcccctaggcccagcctggttaggggtggcggtagcctgaagtaccgctccgggtgctccctgcggcgcactgcacgcactccttacgaccccggggccgtcaccctgacctgcggggtttagactccggggcgtgagtggtgggcagctgcgagcccgcaccacaccccgccgccccctttgtgcggccgcggggttgccggggcgacagcccctccccctcccggccccgccccgtctccgc

SEQ ID NO: 52602 - DNA, 272 bp, Mus musculus
  source 1..272: mol_type = other DNA
ttcttcagaaaagtagtttcctgaaatctaattatcactgtcagttgcaaataaataaataaataaataaataaataaataaataaagtcctcttatcaaaccctacacacttggagtgtttacaacacaatccctgctcttagagcccagcaagtccctggagctgtcggggctgagtgctcgcctgccaggagccccgggaccgctgggggacacgacccccgaggaggcgtggcctcgtctcagcaccacccgggagggctggacacaa

SEQ ID NO: 52603 - DNA, 594 bp, Mus musculus
  source 1..594: mol_type = other DNA
atatacgtcctacttatatttctttgaatcttttgattttcataaattttctttcttaatataagccagtgcctgatcatattcttttaatcataattattcttgagttctaacatataatgctttgatctttgatgggtccatttcaagggtcttctcagtcaactgaattgctccctttaattgggtcaaacgatatttgaaataacttcagatattctaaagatatttaggaaaatgtttgaatcttcaaaacgttggtaaatctctagtaaaacgtttgtaaatgtccctccaaaaatgtgtttttgcagaaataaaactttgagatatcacactcttactactctgaaattttaacaaacacaaaacatcttatttatgtgtcagacttggtggcacatgtctttaatctctgagttcgagtgcagcctgctccaaagatactgtttttgaaaaacaaaaaccgaaagttttttggtgtttatgaactggttttacgaatggaaaactttgtcagtgagtagaagactgtcaggctcttgagtccaacctggcgcctgctagagactccgcgccccaactgcttccgga

SEQ ID NO: 52604 - DNA, 275 bp, Mus musculus
  source 1..275: mol_type = other DNA
atctcctagaagtcatgagaggaagacctgtcatacagcaggagtgccaaccactggttgcttctgaaaggaagatccatcccatgaatacagtctaagacagcatttttgagttttttttttttaatttgaaaatataaaatagcatgtgttattatttactaagtttcaccagcacagttctatcgtatgaaaaatacatatgttggtataacacgctgcctgtccccatgtagccacgccccgtgaggccacacccccaggtctgggcgggg

SEQ ID NO: 52605 - DNA, 448 bp, Mus musculus
  source 1..448: mol_type = other DNA
aaagaaggacttctgaagctctctgctcgtgccctgacaggaaccttgttttaagtggagcatggatataaagctcctaggaaatatataacacttcctgtatgtttctcattagatgggattctagttggatctcagttgctgtgataaacactacataggccaatcagctgaggctcttcccagatgactctaggttaagttgatgtccacaactaagtgcccttgtaataatgggagggtaaatttacctatcgctacagaatcagacacctaaaaatactttagagaattgttaaattttttaaaattcagtgtatatttttccattcattcaaacagatatgtagatctgatactcagacacgtagatctgagtctcaaggggtctgggacccaggatgcccaggatggggtcgcgcgtggccacggcggttgtgacgcggag

SEQ ID NO: 52606 - DNA, 389 bp, Mus musculus
  source 1..389: mol_type = other DNA
tagccctggctgccctggaactcaggaaaaaaaaaaatcacgtttggcaagctccaaaactagtttcattttctggacaagctcagcctaccctctcagtgctccgagatcaccagagagcgctgaggttcagtcaggaagtctacctaaaggtagaagacccgaccctctcctaacggtagcacgcaggcgcgtcctccccccaataccacgcaggcgcgtcttggaggtgggatacgcaggcgcactctccttggagcgcgcgcaggctccgccccccgctccgcccccgccgccctgccctgccccgcccctaggcggttgctggcggcggccgccgccctccctcgacccaatggcgcggctgcggcgtcagtggctcgtccggc

SEQ ID NO: 52607 - DNA, 342 bp, Mus musculus
  source 1..342: mol_type = other DNA
tgttacagggtatggctggcatacccctcccactacctggaatgctccagcccaggcactagcatggctcagggtcatcttatttatttatttatttatttatttatattcatcactttaaggaccagacagaagcagaattcctttcctggtttctcttagtctggaatttgagagaccaggcagcccagccagcatttgcctgggtggcagttccgacagtgcatccccaccctgtagttggtggcccagtctgccagagacccagggctccgcccgggctccatggccagtcctggacttccactccgcgggctcagtgggcgtggcgtgcagacccac

SEQ ID NO: 52608 - DNA, 270 bp, Mus musculus
  source 1..270: mol_type = other DNA
gcttgcaaaccgcacgtgaccgaggagcatagttaacatctgttacagggtatggctggcatacccctcccactacctggaatgctccagcccaggcactagcatggctcagggtcatcttatttatttatttatttatttatttatattcatcactttaaggaccagacagaagcagaattcctttcctggtttctcttagtctggaatttgagagaccaggcagcccagccagcatttgcctgggtggcagttccgacagtgcatccc

SEQ ID NO: 52609 - DNA, 359 bp, Mus musculus
  source 1..359: mol_type = other DNA
ctgttacgcacgtgggaagcgtataaggaatgccctatcagtgaaacagacgcactatcactgattgatggttgttttaatttaaccgaaacttaccgtgtcgggtaataatccgcatttatcttaggcaatactgtttactatttagcgctgtttagacgaaagcagcatcctagacggtcttagtcttgtcctcatctctgagaagctctcgagagtccctcggggatcccccaaaagagacgacgcgcccttcctaggcaacggccggccacgcccctttccgtcgacttcccggcactggccccgcccctcgccccaggagcgccgcccacgcaccgcggaggcctcacgcggag

SEQ ID NO: 52610 - DNA, 251 bp, Mus musculus
  source 1..251: mol_type = other DNA
ccttgaattgaagtcatctaattagaatattttaactgtaaaagcaaagcacctggattgcactcaagaactcaggtattctttgttaaaatttactcaatatactactgcacagtttacactgaaaaagagacgttcaaaaattcattttcaacatgcctggggcacatatgtagaccatttaggttcaggaatggatcctggaaccacacagtgctgtgggcggttggtacgttctagatgactccaag

SEQ ID NO: 52611 - DNA, 576 bp, Mus musculus
  source 1..576: mol_type = other DNA
tgttatatacaaaactgtgttctgtcaaatccgactaaactggaggggcatctgtgcccaggaacagctttttaaaaagaatttaatttatttaataccgcttcaattctatgagtggcactggggaatgccacagccacaggaagcatttctggaattcacaaacagttctttctctgagctcggagtacctggaactccaggcagctcgaaggtgatctcggagccgccgctcggagccggcaggagcagccagcctgcaaccccaacggcccgcggcggccgcccagcgcggcgccgaccccggccgcggcatcccggcagcgcggtggcctcaacggagctgcgggggcctcgacgcgcgcggcagggcccagcccctcccggctcgcgagcctcggcgaagcggtgcggcgaggcgagcagcgagcgcgggcttccggagagacacgcacggagctgccggcgccactccgggaagacccgaggggcctccgcgtgaggcctccgcggtgcgtgggcggcgctcctggggcgaggggcggggccagtgccgggaagtcgacggaaaggggc

SEQ ID NO: 52612 - DNA, 666 bp, Mus musculus
  source 1..666: mol_type = other DNA
cagactggccagggacggtggcccatctgtccgcggacaacagaaagcggtccaccggggccagccagggcggcggggagccggacccggagcgagactggacgccggctacccgctgcgatcgcccgacaggaaaacagcggctcggccgcggtgtggggctcaggggccggacgcaggtgggcagcgccccttgaggcggagaaaccgcctctcccactgaccgccagcggccggcggggagtggcagcggctcccggtcgcccgagctgacagccagcggcgcgagaagtcggacgccgggagggccgcggcggcgcgagggtcgttcggaggaagccgctgggcgctgcccggcgctcgccctcgcccgggctccgcggcaggggcggagagccgcggcttcccgtggttccatcatggctgggccggggccgaccgggtgggcgctggggccagggcgggggcgggcgcgcgagcctcgcctccgggagcttcgagccgcggcttccccacccgccccctcccgcacgcgcgcgcgcgctcccgcgccgaggggcggggcaggaggcggggcctgggcggggcaggcccggaggaaacggaagcgtcccggggccagccaactctccggaggggtacgtatactcggttaattaccgtgtt

SEQ ID NO: 52613 - DNA, 298 bp, Mus musculus
  source 1..298: mol_type = other DNA
ctgtcacagctgccaggcagaagcttttcccgtgtactccggtgcctgcagagccaagacaggactccgtgcactggcggcgtgccaaagaactctttagttaagagaatgcgattttagtctcccagatccagcaaatgtacccagtttaatctgaacgtgaaccggtcgctctttgcagactcagcttggagagcgtcttcaaaaccatccaagctttggcctccccgcgaggaccaaaggggagtgctccctggtgaggggtccgcccttcctcccaaagtctgctggggcgcgg

SEQ ID NO: 52614 - DNA, 300 bp, Mus musculus
  source 1..300: mol_type = other DNA
aactgtaaccttttaaaaagttgtctaacacttttgctctaagagtagaaagcgcacctctgcgataggttcctccgttccgggcgaaactgcagccgaggacggggctgtttccggggagagctctggaaggctctcgccgccggctcctacaggagccgaggggagctgcagcacacctgctgagaggcggcaacacggtaattaaccgagtatacgtacccctccggagagttggctggccccgggacgcttccgtttcctccgggcctgccccgcccaggccccgcctcctgcccc

SEQ ID NO: 52615 - DNA, 426 bp, Mus musculus
  source 1..426: mol_type = other DNA
tgtactatattgtaggctggctttaaactcaaaacagacttcctactttgagaacacatgataatggattctttttgctattcttttaaaaagagatagataagcagttcagataactgacctgccctttctaaaaaatgctcccggagtgacctggtatttttagtaagtaacatttcttctaaagaggaaatcttacaaagaaatatctctgagtatatggctttgtctgatactaggctaagtctgggagtttaagccaaacatttttccttagcaacagagtgaagcaatcctttctttttttaggctggcctcgaactcagtatacagataaaaccaactccacatgccaggtgggcttgctgtaaaatgtgtgtgaagtttagacaactcgcatccccacagggctgtagggaagggttg

SEQ ID NO: 52616 - DNA, 370 bp, Mus musculus
  source 1..370: mol_type = other DNA
gacgggtgaaaatgcatggtctccttgaaacaactatacactttgtagtgatatatatccctacttatctattttaattgctgataaaaatgtagagagcatggttccatgcttggaaggaattggaccaatatgtccaaggccagagttggcagcataatctcttctgataaggtaagacacttagcattttgcttaaacccttcgctaaacaaaaatgtaaatgcatcaagtactacatgtgcatagatgcacaaccatgtataaacatacatagaatggtagaaaggagcaccgggatctctttcttcctttctcaaacctgcccggcggcgagacttggcccttccgtcaggcgcgccgtgattgg

SEQ ID NO: 52617 - DNA, 207 bp, Mus musculus
  source 1..207: mol_type = other DNA
acatgtgtgactgctgcctgcagacactcatttgtaaagcacaaaagaacaccagtttggtgggtttttttttttcccctaatcacacaaggcctgaataaaaagcttttctgctattcttgtgcagctgcccctggactgtcaggagcccccaggcctgggactggtgccagcgtgctggtcagaccctgataagcaagcaggctg

SEQ ID NO: 52618 - DNA, 452 bp, Mus musculus
  source 1..452: mol_type = other DNA
gagccttggaaatagttgcgattcccttttccaagattatttctaaagtttactcatttctaagaacaatcctcattgcggactttgaaactaagagtttaaaacagatcgaaccacaaaggttcgccgactctttaaaacttttccatttaagaaaatcgatggagaaaccccactttgctagagcagctgtgggggtggggagacaggggctgggcttctcctagagtcgcccccgctgggacctcccgggtgcgcgcccgggggaggggaaccgggctggcgactcagtccaaagctccacctgcagtcgcacggcagcgggtcggaggagacgccagcccttgctggaggagagtccgctctgcgcaatccagtccgggacttggctccgcccggagcgtcggcctctccagtgacacaggagtagtgtgccgcacggggtgaggctg

SEQ ID NO: 52619 - DNA, 304 bp, Mus musculus
  source 1..304: mol_type = other DNA
ctgcacagagattagtctagaagctgttagacagtctctgagaggcgccctagggtctcctaaatcccttggctagcccaagttatatccaaaccattaattcaagcctcatagatgaccgttaaaaacgtggctacaagtttattatacaatatgccttttttaaaatattaaaacgggggagatgaccattaaggcagagaaccacgggaggttccagccctaggtcatcaccgatgtcaaagaaagaatttctaggaggaggtcccctcgagatcctcgaataactggacctgctggacgg

SEQ ID NO: 52620 - DNA, 376 bp, Mus musculus
  source 1..376: mol_type = other DNA
ccttgtttaaatgtatactggtagaattaacattaatacgcattagacagagtctctctgtatagctggaactctgtagaccagactggcctcgtaagttttaaaagctgagctaccagactttgttacgttacctagaacgcaccatttaacaacatagagctccctctgtcactgcagcagtcctttttcagtggccgcaaccgctcctgtgcagtctttggctattaaagtcacgagctgccacagggctgagcgtgcgcgcgccgggtggcttctgcaggcgactcctactggggagggacctcacggcacctctgagccccgccccctacgtgacgtgcgcgcgcagacccctttcctcagcgcgtggcgc

SEQ ID NO: 52621 - DNA, 197 bp, Mus musculus
  source 1..197: mol_type = other DNA
atccaagtttaattcaagtcctccagtgtgcactgagcctgggtcagggtagaatctggcttggagctctttatagagaacgctcagagcctatctagatacctcattagcatggagaatgctagatttaacctcaagaaatcttcattaaaactccctttacatttaaatttcctttgctctgtttattttacagt

SEQ ID NO: 52622 - DNA, 517 bp, Mus musculus
  source 1..517: mol_type = other DNA
ctctgttaaacaggaggcaggcggatttctgagttcgaggccagcctggtctacaaagtgagttccaggacagccagggataattatggccctaggccgaaaagcttcttgctctggcagacacaatcggagtccgcctggccggcagggggcgccgcagctcccgggccgccccggccccgcgctcacctgcagcggccgcactcgggcctgcgctccgcgtgctccaccggcagcccccagagcccgtctgcactcgtgctgtcccccgatgcgcccgcgggagtcgccgtcggcggtgcgccgccctcggtccgctcctcttcgtccggcgtcggtgacgccaaggcgccagaaggcggaggcgcaggctccccgagagttcgctcctcggcccaggccctcgcatggaaggagcgccgccgccgccggggggcgccacgcgctgaggaaaggggtctgcgcgcgcacgtcacgtagggggcggggctcagaggtgccgtgaggtccctcccca

SEQ ID NO: 52623 - DNA, 630 bp, Mus musculus
  source 1..630: mol_type = other DNA
ggttcttttttaaaaacaaagtaggtattttaaaatctcggttgtttataataaaaaaaataaagcattactaatactgaagaacctttctaaattatcttacttaatgagaaagaggtttttttacagattccctcggggcgccgggggggggggggtagtcatactaggagtaaggaacctcctcacagttgaacttaacgtgtgtcccactggccattcgggagccgtgaagctcgcgacggcgcaagggccggagccgcgtagcgagcgctggcagctgctgagggcggcggggccgcggctgggctggggccgctctggtgaggagcagcgcggactgccgcgcttctcgggctgtgcggcccaccgacccggctcgggaggatcgtgtggacagctcggtccccgcgggccgcgccccggtgagcggacgcccgccggcttttacctgggcggccgtgacaggtgcagagcgagcgcggcgccgcactcgctccccggcccgcccccctcaggcctcggccgcccggctcgggatgagccgcgggccccgaccgaacgtctgcggcttcgggcgcctggcaccgccgcggaggagcggccgccgcccctagggggaaggcgcag

SEQ ID NO: 52624 - DNA, 322 bp, Mus musculus
  source 1..322: mol_type = other DNA
ctcctttccatataaaaatgctataagaaaaagaaaggtagctggaaaatacatttcttaaagactctaacctttctcagttataggagaatgtaacactctccagccagagagccaccccagagttaagatgacttcctctgagccagtggtggagaggaggccaggatggctgccctttgcccccaaagccttcccttctaaagttttccactgggccccaccctggtcgcctccacccgcagtggcccctcgggggcggactcctgcagcccagccccgcgcggcggaacttccgcagtcgcccgccccgggaggttct

SEQ ID NO: 52625 - DNA, 248 bp, Mus musculus
  source 1..248: mol_type = other DNA
acatttttaatttgttaaagctagtctagaaagaaactgcagaatcagcttcatccccgggtgagtctgagtgtgtgcctattccacagccaagaatccacagaagcaggatccagagacttctgcagatcatcagtggccgccagctaccaaagtttgaacaccgtcctgcgcggaccattgtgtactggggcccttggaggtgcagatctacccgctctgcttgcctggtctctgccgccctggcc

SEQ ID NO: 52626 - DNA, 394 bp, Mus musculus
  source 1..394: mol_type = other DNA
ttccttatagctatatcagactatattctcctaaaacctacaaatagtctgatttttacatccctgaggctgctccccaaggccagtttagagtggctcttgagatatctgcaagaaagaatgtgtcaggtgaccaccagagttcctggctgccctggttcctggactctgttatttgaacaacacagcagtagacctctgatctaattggtattttcacactttcagtagaaaaagaggagaataacctaaaaaaaaaaaagcctatgttatatttctggtccagtattctgttttgaagggagaaaggaactgttcttgtaaacagggtttctgaaacctcagactctgtgtccgactgaggtccatagaatgctctgatgtcatcactgag

SEQ ID NO: 52627 - DNA, 258 bp, Mus musculus
  source 1..258: mol_type = other DNA
aaaaggacaaagtgttctttctaacagtaaaagaaccattttctgcactgaaatatgatctaaccagtgtttaattaagcagcgcttggtcacgtcaggctgcaatgctattgaaagctctaaactcatctgcattttgacaatttcagggtgattttcacatagtagatccagcggactctgagacactgtgacagataactttcttttttcttctgaaagaacttccaaggcaattctcttggacagatttttcag

SEQ ID NO: 52628 - DNA, 482 bp, Mus musculus
  source 1..482: mol_type = other DNA
tttgcatgtatccatgcatttgtgtctgtgtgccatgtacatatgcaggcagtaccctaagacaatcttacttaagattatttggggcttaagcaatcaacttaactttattggttaattgtaagtggattttcaaaattcatattgctgcaaaatatcaagagattaattttctgtatgtcttcagtaacgtggtcagaaaatcattaagattgtttaagaaaagctgatctttaatgaactagtcttatttgaaaaatatctataaagcctcaccagaaaataattcctttaatttttaatacaaataatttagatttccagagatgttttctttttaaaaacgtttattatattttaatttttaaaaaatttattgtcttacaacattgttttatttattctagaaggattagacaagaccaaggtttgtatttcataaataaaacattatggtttcagctttattccttatatttgta

SEQ ID NO: 52629 - DNA, 465 bp, Mus musculus
  source 1..465: mol_type = other DNA
gggcccatataacactgaggagtgttttgtcttgatttgattataagtagagacacaaggctgtaaacattttcctgccatttttaaaatagtttgaacaaaccagtttatttccaagtgaagcatttggcccaggacttcaccttctgtaatggcctctactaaaatttgtaattaatagttggtgttcttcaaaatagttcttagaggcagtagcaaatgctcttctaacagaaaagctttgtggctctcatctttttgatgttttcttaaagggcaaaatttttcacaagcgctaaattttagaatagtactcgatctgtttctttaaaaaaaaaaaaacaaaaacaagatggaaatttcgcgcactagcttggtttccaaggaaacgcttccggctacgttcccacttgcggcactgccggaaaatcccaacgtttgggcggaagaggcctcccggggggg

SEQ ID NO: 52630 - DNA, 543 bp, Mus musculus
  source 1..543: mol_type = other DNA
atgtagcaattattcatagataaatctgttaaaaatatttacgctttcctttataaatcacccacatttttgcaacaaaaacaattttaaacattgacttaaggttaatagttcttcgccgaggagagtgttaacacatgcctgtaatctcagctctcaggacacattgctataacttcttcagaatttaaggtcgttttaaaaacaaaaatgcatctatctcttcatcagtatgtaaattaaatacagccagtatgcatattctttctactattctaaaatatgacttctaaacaaggaaggtaagttctgtattcaaaaagacactgagctttaaaacagactactaaagtgaagagtttgcccactgtgttggccatcttcctacttaatgtttgttaaaataaccaggagtcatttttcaatgtccttaggttcttagaaaaatttagtgaagagacactaggggcagtcctctgaatcggtgcgctctatacactatctagaccagaatcttgtgttagttagaagggccgtgtgacg

SEQ ID NO: 52631 - DNA, 324 bp, Mus musculus
  source 1..324: mol_type = other DNA
tgaattaaaaagctgccgaatgcgttattgaatttcaatatttaacatcggtaatttgattttaaaatgtaaagccaaagataaacggtctacttgaaggagcctctgagcttgtcacttaaagtgcaaattgggctggttcttttaagaacaacaacaacaaaaagaaaaaagagtcggatttattcactttttcaacgtagcaagctttgttccctataaattttcactttggttattaaaatattcactgtaggaaacagatttgtaacccatttgccagaaaaacaaaatttgatatcctaagcatgcaaagtttaaaat

SEQ ID NO: 52632 - DNA, 503 bp, Mus musculus
  source 1..503: mol_type = other DNA
ttcccaaattagttttggtcagaattttattctagtaactaaaagtaaattaaggcaggcggtagtaaacagcataatataatgtttatttcctaagggcaaggaattatctatcaccttgatatgtcttaaatacacacatgcatgcacctgcttgtgcacacatacaaacaagctgtttacaccttaatatatataagcactttcatatatgaaacaaatttagatcattagctcatatatgtttttaaatgttgaactcagtttttaaagtgctttaaaaatattctctaggaagtgctagaaaaattagttaggcatcacttcaacatcctgcagttccttgtacttgagattaggggactattttatataggaaaccctctccctctggatcgggaatctaacaattaaatgctgggagcagaacgagataatcagaactttggtctggttcccagagaaagagatatatccaggcaacagaagctggggttcctttt

SEQ ID NO: 52633 - DNA, 231 bp, Mus musculus
  source 1..231: mol_type = other DNA
cagaactgaaaataacttttcttttggacatgtagatttacctatgaatgttggaaggaacacatgccaatagaagcattgaaattacattgaatgactaaaataattcatctttattctgggaggatgctgaatgcagaaaaaaacaaactctgagagtgctgagttcctgaaatcaagactcttgcctctattctccaagagtgacatacctcataaagtgccttttga

SEQ ID NO: 52634 - DNA, 208 bp, Mus musculus
  source 1..208: mol_type = other DNA
aatatgttttcttgaagaaaaagaaaagatgtcttaaggcaagaacagaattggtctaaagtaatgataggacatgatatcttaaggtacatgagcatattttcattttcaggaaatcttgccatcctaagtttgaatacagacagatttcttgtactaagatgatagcaacttcatgacgtactgccaggaagtcagaggttcagcc

SEQ ID NO: 52635 - DNA, 430 bp, Mus musculus
  source 1..430: mol_type = other DNA
gtggcatatgatgtcatctgatttcatattttctaccaggggataatacgtatttttaaagtgacagagctgtatgatatatgcttgagaagcaggacaaggactgctctgattgtctttactactaaaatcaaattatgtatctcataagttctgtgacaggcaggcatacatccctctgcctcacagccattcccaccctggctgaaaggggcaggggtggggccttccttccttctgacaacctctagcaagcaggtaacaagaatgaagtcccactcctgggacagagatttgtccaaagccaatgttgctataaataggaaagaggcggtcccaccgcttgcaggcatcactgatgcccctaccataaggaatgctaggagtaaagttactattatcacagggtcctgggtacactgctgaatta

SEQ ID NO: 52636 - DNA, 341 bp, Mus musculus
  source 1..341: mol_type = other DNA
ttctgtgacaggcaggcatacatccctctgcctcacagccattcccaccctggctgaaaggggcaggggtggggccttccttccttctgacaacctctagcaagcaggtaacaagaatgaagtcccactcctgggacagagatttgtccaaagccaatgttgctataaataggaaagaggcggtcccaccgcttgcaggcatcactgatgcccctaccataaggaatgctaggagtaaagttactattatcacagggtcctgggtacactgctgaattatggctaagtctttcagggtgtgccaaggcacagcactcagttggttttatgctggaaccttg

SEQ ID NO: 52637 - DNA, 369 bp, Mus musculus
  source 1..369: mol_type = other DNA
agccaatgttgctataaataggaaagaggcggtcccaccgcttgcaggcatcactgatgcccctaccataaggaatgctaggagtaaagttactattatcacagggtcctgggtacactgctgaattatggctaagtctttcagggtgtgccaaggcacagcactcagttggttttatgctggaaccttgcaccggctgcgggacgcagggggacggtcactgtcggtcctgcctggtggttgcgtccctgagctcagcgtcccgccgccccgggtgtccccgcccgcgcgcgcccgttggggggcccggggtgcggcgccggccgcccggccgcattgtgacgtagcggggccgcggcagcgcctccg

SEQ ID NO: 52638 - DNA, 537 bp, Mus musculus
  source 1..537: mol_type = other DNA
gattatgaaagaaaagaaaaaaagtgtttttatttatttatttatttatttattttgtagaccaggctggccccatactcagagtgctgcctgcgaatgctaggattaaaggcatacactactatgcctggcttactgtttattaatattgccttaatttatatatatatatatatatatatatatatatagagagagagagagagagagagtaaatgcacttgtttcttttagagagcaagccccctcgctggagctctcgggagtcccgtacagtatctactgtattgaacagtacaggatgtgtcagaaggttcttttggactcctcaaagctcgaagacagacgtcaagctcttctacttcctagtcctgtagtaacaagtataagattttaaagcgcggccccagtcgggggcggggcctcgcgttgggctggcagccggggacggggcggggcctcgggggggcgggcccgaggggcgggccgggaggcgggtcggcgcgccagcccagccttgcgtgctcacgtgacagg

SEQ ID NO: 52639 - DNA, 339 bp, Mus musculus
  source 1..339: mol_type = other DNA
ctctaaacattacaatgtgatacttgccacccgaggctcaaaagggccttttatagttcacagcaggcaagttttaaagcaagaagctttaaagagaaaggtcactttctctatttactgtgcccagaaagcctctggctgctcatctaatctaaggaagaaactcagtttccttgagtaacaataagtttctgtctctcagaggcaggcagtgaaggtagatccccctcggagcccgcaggcagggctagggcgacccgggtggcgccccgcgtggccgcgcacacccgccgatgcagactccggcccgcaagccccgcctcccgggcccagctgatc

SEQ ID NO: 52640 - DNA, 446 bp, Mus musculus
  source 1..446: mol_type = other DNA
ctactgaattcaaacttcaaaatgtagtgtttttaaaataaccacatccaggctgtagggtactatagagaaaactattatgcgtatttctagctaaacttgatcggtgtgtgctgtcccacacagtttatgtgtatctgctaggcaagcattctgctacccaggtattgtttgtttgtttccatttaaaaaatgcaatgagaatttctccatgtcatcaattttcctaatccgtaagatggttgaaaaaaaatccttgttcagggcctgtgtaagggctcagcacgcccagaactccccggaggtcggagaggtgcccaggacatctaggtcccagaggagccttctctgcgcgctgcgggccctattaggccacggttttgaacttgggaggagcgcgccccaggtccccgccctgcccggatccaccactctccctaccggga

SEQ ID NO: 52641 - DNA, 630 bp, Mus musculus
  source 1..630: mol_type = other DNA
acatgttccgaaagcggccgagcgcagcagccagaggcggctccgtcccgcgtcctcccgcgctccagcgctctctgcggagcccctccgcgggcctacgtgtcctttgccggcgttccggagagggctccaggctgcggggtctctaaggctctccgtgccctccggcttgtggtcatgtagctcacccggggctcccgctcaccgccccgtgctctcagtccccaggtacggtggggctggaccggggctgcggtgcgcgggccccttgcaccaggagcttggaggtctggggcaaggggcggggggcgagactgtcccgcctcccggcgcctgaggccagcgcggctccggcgctgcgccacttcgcctcgggttggctccagggcgcttgctgggggcgggagggagacgtcctgcccggagttgtgccggaaagcgccggctcttagggtcccagctgagcgggtgggttcgctcgcgggctgcgaggcggcaccgtgtgcacgcagtcacctccgcgctgcacgcccaggcttccgagtaaactttgcgcccagcggggacgacagtaccgcgggccgtggtgccggatccgagaaggggggcttaggtgctccacccagctcc

SEQ ID NO: 52642 - DNA, 456 bp, Mus musculus
  source 1..456: mol_type = other DNA
aaaaaaaaaaaagaatcttgaatgctaggttagtattctattattaaatttcaaaccagcctgtgcttatgaagaatatagtcttctactcattcgaagagattaaaccactgtcctagaacttcacttgaaaaattgcaatagtatctatgacacagtatgagctcagctgatgaggcatcctggatccccgtgatttgctggcacctgaagggccgtccagacgctcatcaagaacgccttggcaccctggttgaacaacggtggcccgagcgctccgtccctgcctcccacggccgcagccaggagccaccggggaccacaaccgctcccctctcgcgggctgctcgtgcgaaggcgggatggggcttctggctcctcgcagccaatgagcgcgtggcctgctttccggccggagagccgaccaatccgaatcggccggtgtcatcttcggct

SEQ ID NO: 52643 - DNA, 476 bp, Mus musculus
  source 1..476: mol_type = other DNA
ttcttgcaaattttaacgctaacagagtccacgatggctctaattttaggttttaagttagataagcttcaaaaccccctcccccatgaaatcggaaagggaaatgtgggttcaccaccccttaactttttgcaaatttaatatgtctgcgtagaaactacttatttaaatattcttacagcttaatctgggagagattacgtcagcgccagcggttacagtaactaccgtattgacgctacttgttttcataggacaaacagggaagtaagaacagttcacagattaaaaaaaaaaaaacaaaacgctattgtttcatttcttagattaaagctccgcttgcgaccagcaggcggcgctgcgggctaatgcagccgcgtctccccggggctcttggaaagagcgtcaaagggcgggaggtgaaggcggctgatggacgttctatccccgacccccccgggctctcggcctgcggg

SEQ ID NO: 52644 - DNA, 381 bp, Mus musculus
  source 1..381: mol_type = other DNA
agagtcctctatgcatcatgtacatgtaaaattaaaataaaagcttgtccatggatgttaacatgaattcataatttctgcaaacaagaggaaagagacaaacagtcttctccttcctttcttctggaaatcctttggcttaaccaagggttatgagaatagtttgcagaagtgccctcctggcatgtctgcaactgaaagtgcccttcagttctgcagtctacgttcctcaattgttccattattttcatagggaaacactattcacacaggtaaacataaaaagacatataaaatgttgcagtgtaagatattatatttagtggtaatgccacatagaccaggcttatcttgcccagggatgggatgaaagatatatga

SEQ ID NO: 52645 - DNA, 126 bp, Mus musculus
  source 1..126: mol_type = other DNA
cagagccacgtggatgctctttgttggtctagagtgcctgctgcagggcccctcagcccagcccgggagaccccattacatatactaagtgctgggccaggtacatcagtgtaagagtctcagata

SEQ ID NO: 52646 - DNA, 383 bp, Mus musculus
  source 1..383: mol_type = other DNA
gtctagacaaccaatgttttgttctccacaagaaacattctttatgaaatatgcacagatctctttaagagtatttttctcagtaaaaagacagtatgagggaaaaggttaaagatcttcctttttgaggaaaaaaaaaaaaaagaaaagaaaaatccatctaaataattcttccatacctcagtgacaaagagcagttaaaacagttttttaaagggatcagcccccttttaacagttgattgtcaagaaaacttaccttaaatcctttatcattttttaattaggccggcaaatcaaaaaagcatgtgcctcattttacttaaagcaaaaagctctggagtccttttctccttaagtcactgtgcagctgagagatgagaa

SEQ ID NO: 52647 - DNA, 267 bp, Mus musculus
  source 1..267: mol_type = other DNA
cttccacaaatcgatttattttttaataaggctcatttgagattctgggtccacagttcatggcttgcagatcatttttttttatttaatgagagagaggccgagtccttgtttccaccgcgcggcgtccccgctctgtgcgggtggctctcagctggcttccctctgttaataaataagtgttttatgtgaatgatgtagtaattgaaagttgcaacccgcttggaaaataaaatgtgtagcccagtttcataaaagctgctctct

SEQ ID NO: 52648 - DNA, 240 bp, Mus musculus
  source 1..240: mol_type = other DNA
cccccgcgcgcgcgcacgcacacagcgatgctgaagaatgagtgtttgagcgctctttaacacaacatctactatggaagatgtatatgtggtaatggaatagctaaggaagtttggataagaactagaagggattaacttggtgaatattcattccctttgtccctacctactgcccctaatactcgctgggttggagaagcaggggctagggaaaagggctgtcactttgcttcgacc

SEQ ID NO: 52649 - DNA, 312 bp, Mus musculus
  source 1..312: mol_type = other DNA
caagtcttcaaagcaaggctgccattgaactgcaggagaaaacatctgctgtacaaccctccctcagctccagttgggaggtgggaagggaggcgcccgccttgcggcctcccgggcaaaccaattttccgggagcgggcctgctccaaggtccggaaagcttctactgagcgggcagcgcccccgccggtggcaggcccccggggatcccattgggtagcgcgccttaccctctgggtaaagttgctgcctcagggtctgggaaggctgagggggcggggaactgcgccacccgctgcttctgaagtccgc

SEQ ID NO: 52650 - DNA, 465 bp, Mus musculus
  source 1..465: mol_type = other DNA
ggccaggccttaccgtggtgtggtgtgccaatgctagctccaccgcaacaccaaagcacagctaaatagttaaatagttttgtgacgggcagccggggagccttggtgcctcagccgccagggagggatgctcgcccgatccgggatgccgcgaggccgtccgccggggacccgcggcctccgactcagtgcatttccccgggcgtccagccccgtctcccgcgcgccccgtcgctcaccgccatttgcagaggcctatctgtcggaatccgagtcggaaagctgcccctcttccatgtcgccagcttccagcgccatcttcccgcggcgcgcagggtcaggagagcgcttccggcgggcggcggaggagggaaggccttagggcggtgctgcggcgcccccgtgcgggcgagcgctagggcggcgcctccgcaggcccgggcgagcgtcaccatcacaaaactc

SEQ ID NO: 52651 - DNA, 260 bp, Mus musculus
  source 1..260: mol_type = other DNA
gttctgtcacatggcagagtgcctgtaactaaacctgtgcgtatgtatgtatgtatgtatgtatttaataaaaggtaacatgatttatttcttgtaggcctgtaattaacagcactttaatactattttaactgggctgcgcggaactcgcctcccagcgctgagttttgtgatggtgacgctcgcccgggcctgcggaggcgccgccctagcgctcgcccgcacgggggcgccgcagcaccgccctaaggccttccctc

SEQ ID NO: 52652 - DNA, 459 bp, Mus musculus
  source 1..459: mol_type = other DNA
ttaacacattccattaaaatatcctgtaacatgtataaattgttcagctgttacgtcttggtgtgggctgacccctcccacctcagcctgatcagggctgagataggagcttaggcattctttaaaacgttaatttattactgtaagtgatttctagggtgcggggcactgcacctcaaatacctttagctgagccttttcagtcttacagacagaaacgtaagcaaaggaaaataatagaagatgctttgattttctttctgagctctccatcctagaatgcactctgtgtagatcaggctagcccaggtgtgtgtacagccacacttggtgtgtatgtctccacaatgtcccatttttaaaccattcataatggtttccatgaagagcaaagagctctgacctgcatcctcttagctctgtggagttaacaaggccattgttacatcaatggcagca

SEQ ID NO: 52653 - DNA, 626 bp, Mus musculus
  source 1..626: mol_type = other DNA
tttgccctctagacttccatagagtttatctcattaggttcattggtgggctgtttctgattttacaaaaacgcacaccaagatgattaataaaataaaataaaatcaatgttgctttttttttcttaataaacaatctgttttccttcctagagaaagacacgggcacgcaagctgcgagctgggaccgcaggcttcggggtgaggctcgggcgaccgcggacgcccgtggccgctcccgtgcgggcacaggaggcggcgcggacccgccccggaagccttcggctctttcccgccattcgcaggcccggcccttccaaggggtccgcacggggttccacgagaggcggcaggcgctgggttccgggctaaggaccgagcagcgctcggggcgcccctccccgccacgcccagctcggggctcgaggccgacggttgcccgagggtcagattttgaatttccaggccgggcccgcccctccccaagccgcaggggcgcgccggccgctcgccattggttcggcggcggtcacgtgggggctccgccatgttgcggagcgcggcccgtgccacctccgccccccgcgcctcctcggcccgcccgccgctctgagcagcccgagagg

SEQ ID NO: 52654 - DNA, 307 bp, Mus musculus
  source 1..307: mol_type = other DNA
cttctcgatattcctggaggagccagcagacagggctgagccagagtccttgtttcggagacaacctccagtgtagctggacctgtgagactcagtctgtttgagtactcagagtcctcccgggccaacgctcagccgcaagcgattggcgcgctctaggcacctcctacggcctccaaggatcctggtgccctgacgattggctatggcctccgccagtcaaacactagtagacgccccgccttacaggggctggcccgaggctggccccgccccagggctccgcccccttcggagcctagtcagc

SEQ ID NO: 52655 - DNA, 292 bp, Mus musculus
  source 1..292: mol_type = other DNA
aggctattcacaggattaaatatgttaatgagctatcaataaatattagagtattatactgattacccatcattttcttattaatcttccgaaagcagggagatcttcttagaaaataaaaacaactttctaaagaagccgatacgccttgcttaaccttaataaatgcataaactattaaaaggataattttagtaaatactatcttaataaatgaatgaacagggagtggttaaaatggccagagcccaggcggcagggcggcgcccgcgggccggaagtgcggcgcacg

SEQ ID NO: 52656 - DNA, 479 bp, Mus musculus
  source 1..479: mol_type = other DNA
tgcctgcctgctgccatcttcctaccatgatggtaaaactaaggaagccctaggttttgtttgtctttgtttttaaacagcagttgaaaagcaacgaaaacgaactgtatgtagtgcttgtgacaaaggcggtatccaagataagtaagggtaatacctacttaactagctaaccatctagctggatggacagacagacaaagcaaccagtcagctcacaataaattgtcctctctagtgattctacagattatctgccaagatacagaattaagaaactactgtctgagaactagaaagttttttatcttcccaggtcgttaagactcaatctcgtttatccccgggtctcccgggcgtcctgggcggtcggcagagggagcaaatcacttcggacggcctggcagcgacccgcggggagttcggcgacgggggagctgtcccccgtgcccgccccacaaggctggcgggtcaccctc

SEQ ID NO: 52657 - DNA, 601 bp, Mus musculus
  source 1..601: mol_type = other DNA
aataataataataataataactactattattactattttaccattgtctcattgacttatctgacaatagaattttgttatttattttataagcctaaaatatctccatctatgataggtaaagacagatttctagattcttgcctgcacaaacaaagacctgggctcagtccttgttagcataggcgcctgaggttgttcatcaactaccacccagaggaagatttcttgagtaatgatcattagttatatctccaagggttaatcattgacatccaaatctgggtttgaacagagatcttgcatttgagagttactttttgagttcaaaatataattaaatccaccagaaagttaccaacatatttgggaagttatgatgctatgtagatatctaactatgagaccaacaactggacacattctttgaatcagaggaagtttccaaggtcacatcttctgcaaaggtcaccagctttccaacagaattgttcttttagcctgatgactccctttacgaaaagtatgtcacttaatttttcttttcaatcagacaaagaatactgacatggcttccagagaacacacttgaatcaagtgt

SEQ ID NO: 52658 - DNA, 501 bp, Mus musculus
  source 1..501: mol_type = other DNA
aggccagcttccatcttcgctggcagcacacaggggcttgtggggaccagacatgctggtgtaggacgtttttggcactgtgtctgacacacgctccagtcaatcacagtaaagtacttaataacagatgtggtaattaagcctgaagaacgcagtcctatttttccattttatttcagagaataacaaatttttgaactgggcacactggtatcatcaaaaaaaaatgaggcctgtgcaagaccttctttctgaagttctggattcgccttatacttcaaagccaaaccctgttgtagatttcagacgtttaaattacactgcttaagagaaaggtttcagataacctgaaaccaccacaaattaccatattttaatatgatgaattatctctgaaaaattaattacatttggaaagttttgctgtcttttaaaatgataaacatgagtctcgtctgtctaatcattaagggaaattaatttaagaatgtaattacttgg

SEQ ID NO: 52659 - DNA, 509 bp, Mus musculus
  source 1..509: mol_type = other DNA
acactgcagccattaattaatatttgctaaacgaatgcataccttataactattgggatgaagatggtatctactttcagcacacacattctgagtactgtagctacagagccagagctgctaagtagtattagttttcaggaaagtattgcagtgtttaaagctgccaagttcaagagttggttccaactactgcaaaagctgccatccttcaaatattgaacactaggaagcttaaatcccattttatacgtggaaataagagatccaaattaagatttctgattgtgaaagacaataattgtgtcatgcatatatgataagcacccagactttcgctttttttttttattataaaataatgtgcataacctgtacttgagaagaaaatcgtcaagtacggtcacctcagctatttgatcactctcctgctgtgacaggggtggggacagcggtgcacccgggccaggccggccgaggggcgtgtcggggcgtgtcgccgacgtggc

SEQ ID NO: 52660 - DNA, 325 bp, Mus musculus
  source 1..325: mol_type = other DNA
tttaatattgggccctaaaatgcagcctctgattctgagagccttggggtctgggttgcctccccagggatgaggctgcacccctctgggacattcttccttaaggattatgctgaagtatttccagggaagtgatgttttccccttaaaagcaagaatttcatcgtaaaatatgaatctatagaatatttacagatatggtgaaaatccgatttgctttagggaaaggagtctcagtctcccaaataaaccataatattgatatcccttagacgcagcataggtagatctccagctttgcttctgcgggaatgcccgaatgccc

SEQ ID NO: 52661 - DNA, 362 bp, Mus musculus
  source 1..362: mol_type = other DNA
cctctatcttctagagatgggtactaggggggtctgacatttcctaggctatccagcaaagtgtagtaaaactacgatttgaaactggttattagaatgaacagaacatctgctcgtgatcctgacatgaagcactggtccagggaaaactggttgccatttgccccgtacagctctcattgcctaaagaaggctttactgctctgcttagtttgtgaatgtatataattagttatattttttattttttttaaatctagaaatgcatactgagctctgaaatgaaaagaatctgacttcttttgggccaaaggaagcagagacgtgtgctcgcccaccatctagataatttatatttggag

SEQ ID NO: 52662 - DNA, 495 bp, Mus musculus
  source 1..495: mol_type = other DNA
atgtagacatagtttaaagccagcccaacttgctatttccatatttgaaagggaaaatgtgtattgagcccagaaaatgtgtattgagcccacatgcaaattttccagtgattgactgcagatcgatgatagaggtcatctctatgcccactcctgagaacaagtttaggaggcatgtcccagtattatgtgtcctgcacatcatgggaggacaatggggacagtgtcactgtttttctgtggctctgaaaagagcaggctggctggttacaattctgagaaatgtaaatgaagaacatttttactcatttgacaaacagcatgtcaggccttgccctgtgatctgggatgacacggtcacttaccaggaaagaaaaaagtctctttgatgttttctccaagactttaaagaaaggttatctctgaagtatgaagtgaaggttgctttatccagaaatttccatggattatcctctgtccatggacagaaggcaa

SEQ ID NO: 52663 - DNA, 369 bp, Mus musculus
  source 1..369: mol_type = other DNA
acaataagattaataaacattataaatagtttgtgctcacaatgcctcgtgctaactttcataaaatgttacgaagaaaccactatgtgggttccaactgtagtcgtgaacacacacacacagctagtgttggccaatttgtattaattttgttcatagtgttaaaaaaattattttcatcctaactagtttattttggttcagaacacaggaatgaagaactcaggtctgtggcccttactgcctgcagacatcatcagatgtattacctgctcaagcctgtctggaaggcatagctctgaatcccagctctgtcagctaaccaatctgtttctgagtgtgatcctctgccagacagcagggggacaa

SEQ ID NO: 52664 - DNA, 389 bp, Mus musculus
  source 1..389: mol_type = other DNA
ttgctatgtaaagcatcgctacattctgcatactgactgttcagagcggtgactaatggatgcttagattatgaatgcatacacattaaaaaaataacaaggttgttccccactgaacttgctgtctaatgagaaagtttcccctgcaagcttttgtatcagataaaagcaggagggcaggcgcatgcgctcgctactcagtgaggctcagatccttcacctgtgaaaggagctagtgtagaagttaagaactcttaactttccttggctgccaaggcgcaggcaggcgacttggactctaccagtcagacacatcaccttgagactccagggttccagaagctgcagtgacatcagattgcaggtgtatttcacactcaggtaaagtg

SEQ ID NO: 52665 - DNA, 432 bp, Mus musculus
  source 1..432: mol_type = other DNA
caaaaataatctcagtggtaaaatctgtatgtattttaacatagttcaagaggaaaatgaagaaatctgtattacaataaattcaactctcctatacttactttaaatgactgttgtgagagtcaagtttttataaaaaggagcctgctttctgggaaaaaggggaatttttatttttctaattaaaattaagaaaaacatatcatttgatttaaacaattaaatatttggggcaactgtttgctatgtaaagcatcgctacattctgcatactgactgttcagagcggtgactaatggatgcttagattatgaatgcatacacattaaaaaaataacaaggttgttccccactgaacttgctgtctaatgagaaagtttcccctgcaagcttttgtatcagataaaagcaggagggcaggcgcatgcgctc

SEQ ID NO: 52666 - DNA, 487 bp, Mus musculus
  source 1..487: mol_type = other DNA
aggccaaggagccggacgggaagcccggccgcctcgcccctccagcgggccctggccccaaatccctcatccgaagcccggtttccaacccaccccgcgccgccggcccctcggtcccggctgcgctccacgtgtggaccgctgcgcccgggccccctctgacagccgccgcccgccgtcccgccccgcgccccgccgggcctctaaaaccccggcgccgcgccctcctccgcggcatcttagccgctcgccccggcccccgcgcacctccgccgggctgtgcagccaccgcccgcgcctagctgccccaaacgagccccgaggagaccctcctcttcctgtgcccggagtgcacgggaatcccgcccccacccgctggcggtcctggagtcgctcggggcagtggcccgggggatgcaacgtggaccgcgcgggactgccgtctgcatcgccgccgcgcctcgctgccccctgcgctagatccagc

SEQ ID NO: 52667 - DNA, 575 bp, Mus musculus
  source 1..575: mol_type = other DNA
ttggaaaacaggtgttcctttattttcagccaaaacaggagtgcctttttgaaactagtaattgttgcattggctgctgcagtcactgtatccagagggggagcacggagctctcccgctgggagagcccggtcgggagcgcgccgggctcgccgggagcgtgcgtgggccagcgcctccggaagcgcgcgcgggcccaatcacccgcagccagagcgccgcggggcctgggtaccacgcgccctaagggcctgcagcatctcgcgagatctcgccggctcgcagcccgggggagcatcagcggcggtccgtgccagagccgcggctaccggcgggcgggaggacgcggcggctgcggcggcggaaggggcggtggcagcggcggcggcggcggcggcggcgcgcaggtcggcgcggaggcgcgtgcggccgcgcctgctcgctgcggtgcggaggaggccggcgctctccagggtcggcgccgggctcggggcgggctgaggggcgggctgagcggccccgcctcccgcgtgctgcaccgagcgccgcggccccgccgcgcctttaaaccgcgg

SEQ ID NO: 52668 - DNA, 369 bp, Mus musculus
  source 1..369: mol_type = other DNA
ttaggtcaatattttaagaaactggcactctaagggcactttaaaaattgccttttgtaaaagatgaaaatgctaagttttcatgagcggtccaaacattgctccttttctcagaaaataattcttctggcagcctgtactacactcccacgtgtgtccagtcactgtcacactggccccggggctgggggaggcgggaggtaggaggcgactctcacagctccggcctcccaactccttccaacagaccgctgagcccctgccggagtacgggagggagccaacagatcccctggtgctcccagggagctgcaaggatttccagcgctgtgagtgttgtctctttttttaatctaagaagactcaggg

SEQ ID NO: 52669 - DNA, 504 bp, Mus musculus
  source 1..504: mol_type = other DNA
aaataaggttgatagttgcgaagagttcattggcgaaatgaacattcatgttctttttctactataactagtaggctgccaaaagccagtgtcatataaaaattgctttccctttcaaaaaaattatatattttataaatggtttttatgcaatttttaaaataaatgtacttaaagtttcctgaacaaacaaaaccaaaaacattattgtataagaatatctaatttcatgcttatatccatgaggaataagagtacctactttaaagggggggagaaccttaagtttcacttctcagaaaactagcgcgagatcaagaaggaccaggtctcgatctcgggtcgccgcggaggcctgcgactgctgtccggtctccaccaggccgggccagctgcggtccccgcgcgctacgcgccacaggtgactgtgtcaccggtggcaggcgccgagcccagggacggcgcgggcgggtctccggcacccagggccccgcccctcggcct

SEQ ID NO: 52670 - DNA, 489 bp, Mus musculus
  source 1..489: mol_type = other DNA
atcagagaactctggtacaccggccgcagctccgtgctcaagcctgcactgagctctgctttgtgtgacagcccctttccgaatggccaatcaggagtcaggtgagggaatttgggtcccccaaaccacccttgcccagccggccatccctctccgcgccgcggcgccccagggagtgtgcagagctctgccaaactcgtgcgcccgccacgctccgcgcgggtgcgggcggcgaatctgggctgggaccgttgctccgctggtccggaggccgccctgcctgccgccccgcgcctcctggctcttggcggactgcgggtctgtcccacggggctccagccgggcctggaaactcctgcactgttcagagctcagcacgctggggagctggagcgcagagagccggggcgctgctggccgctcctccccaccccagccccgcccgggctctgggagtcagagttcgccccccctccgccccccacccct

SEQ ID NO: 52671 - DNA, 360 bp, Mus musculus
  source 1..360: mol_type = other DNA
ggccaagatggccataaagtcaccctgaccttggctgttttaacaacagatgtgtttacgggttccaaatgtgctaagaacaccagcatatcgtaggcagtgatactgcctaaatactgaggggtccccgcagtgtgttgcagtgacttactgcaacagtgaagtttaccgtaggcagggccagggcctgagcaaaggcttgagcaaagtagccatttcagactctgactgggagagatagaaagtgtaactaacacatatgtagttttctcactctattaattttaattgatggttcaggctcattaattatggaaccatcgcagcttgacgtgaagtctttctgcaggctagcctcgc

SEQ ID NO: 52672 - DNA, 415 bp, Mus musculus
  source 1..415: mol_type = other DNA
ttccagacagaaaatgattcatgcttcttatttcgaagtgcatattttcaatttcaaatttttctcctcagaccccgggcggggagtggtgggagtctgggccaggggctgggggaggggatcccagggatcccacccacagcagtgcgagcttgctgggggctccagcatccgagctccaccgggggacagcgcgctgaaagcccgaggtggccgcacgggcgtcgtttccttccggagaggagaatggccgatccgcgggtgatggggaaataccgcggcccgcgcttccccacgcctggcagccacgacgcgggtggctcctccttcggaccggtcccgagcccagcagcaggcgggcgggaggcgggcgcgcctgtgacagggtggcagccgagaagcggacgcgttgctg

SEQ ID NO: 52673 - DNA, 405 bp, Mus musculus
  source 1..405: mol_type = other DNA
atctccatgcaatcctgagttctccctcgagaccactacagtagtgaccataatgattataggaattgtgatgtgtgtgtgatgaatcaccaaaaacacattttatttggatttatacttctatatcactgttaatcattgaaagagaggtcatgaaggactgctgcttaatattatagactcccacagggttgcctgcagcccagtcttaggaaaacatgttaactttgtttccctcctcaaatgactttagattatgtcaagttgacataaaacaatcactaaagtggtgttaatacagctttgtttttaacacaatttctacttctttgaaacaatccctttagaggaatgaaagctagtttagtttcacttacactcccctgtgattgggtagcaagcaca

SEQ ID NO: 52674 - DNA, 440 bp, Mus musculus
  source 1..440: mol_type = other DNA
ccagatgaatttgcaaattgctccttctaattcgttgaagaattgatagattgctttttgcaagatagccatttttacaatgttgatcccagagacttgaagtttttatcatacagattagagtcactccgagatattttatattattgagaaaggccattgacttgtttgagttaattttatatccagctacttcaccgaagctatagggtcacttatatatactatcatatcatctgcaaaaagtgatattttatacttcaagtactatgttgaaaaggtaggaaaacattttcttaactgaggtcctcaaatgactttagcttatgtcaagttgacataaaacctaaagtggtgttaatacagcttcatttttaacacaatttctacttcttagaaacaatccctttagaggaatgaaagctagtttagtttcactt

SEQ ID NO: 52675 - DNA, 353 bp, Mus musculus
  source 1..353: mol_type = other DNA
atagattaaatgccactaattgacatatacatagtcccttcaaaggcacaggaattctgttaaactcacagtgattgtgacagcatgtgtaagacctgtcaagccctaactgtttctgcccaaacaccctgacaacatgttgtgtgcccttctttttctgccaagaaagtaagtgtttctggcatgaaaaacagcagtttcttttgtttcactttcatcttctttgaaatgcaggagtttctgaaaggtaattagatctatcctcctccatgattggctgaagggtgctccctgcagctgaagaacttcatccattttctcttaagatttcataggtaagaaggcattcagga

SEQ ID NO: 52676 - DNA, 489 bp, Mus musculus
  source 1..489: mol_type = other DNA
ctccctaagatgaaacccatacttgggcctatatctgggcaagaaactaagactatactggtcatatgccctcagttagaatttaattccattattctgctaaatgaatatatcaaaccaacctctaatgatttgccattatacctatagattaagacatccctaggccttatggatgctcatatatgcaatagatcataatcaatatagatatccataaatgccactaattgacatatacatagtcccttcaaaggcacaggaattctgttaaactcacagtgattgtgacagcatgtgtaagacctgtcaagccctaactgtttctgcccaaacaccctgacaacatgttgtgtgcccttctttttctgccaagaaagtaagtgtttctggcatgaaaaacagcagtttcttttgtttcactttcatcttctttgaaatgcaggagtttctgaaaggtaattagatctatcctcctccatgattggc

SEQ ID NO: 52677 - DNA, 381 bp, Mus musculus
  source 1..381: mol_type = other DNA
gattggatttaatattactccacacaatgaaacccattcttggtaccatatctgggcaagaaactaagactatactggtcatatgccgaatctaattctattaatctgctaaatgtatataatattaaaccaactccttatgattggccattatacctatagattaagatatccctaagcccttatggatgcttatatatgcaatagttgataatcaatatagatatccacaactggacaataacacagtgtttgttagactaaaaaactttctttttctgccaagaaattaagtgtttctggaatgaaaaacagctgtttcttttgtttcactttcatgaaatgcaggagtttctgaaaagtaatgctcctctataactg

SEQ ID NO: 52678 - DNA, 298 bp, Mus musculus
  source 1..298: mol_type = other DNA
tagaacagttggcataattgttaaagggttactcaagcaggtcttacagagctctaaaaacggcatgatcaagggaaataatgctctggatttccagagttggtggaaatacaagaaaatagtgtcttttgaaaaactcacagtgattgtgacagcatgtgtaagacctgtcaagctaaagctctgcacagacctctttctgccaagaaattaagtgtttctggcatgaaaaacagctgtttcttttgtttcactgaaatgcaggagtttctgaaaagtaatgctacctatataactg

SEQ ID NO: 52679 - DNA, 314 bp, Mus musculus
  source 1..314: mol_type = other DNA
tacagtagtgtgaatgactaaagaatatgatgccataatggttataggctaagttacttaaactcatgatatgaaccaccaaagtttatttggatttatacttctatatcactgttaatcattcacaggcttgcctgcagcctagtcttagaaaaacattttagctgagtttccctcctcaaatgactttagattatgtcaagttgacataaaatcactaaagtggtgttaatacagctttgtttttaacacaatttctacttcttagaaacaatccctttagaggaatgaaagctagtttagtttcactttcc

SEQ ID NO: 52680 - DNA, 283 bp, Mus musculus
  source 1..283: mol_type = other DNA
ggctggtaccagatcagatgtcagccaatttttgaggcacagtgggttaccccgccctccctaagagtgggatgggaatggaaatctgatgcagtttgcacctttaaggcctctctagggagaccctggataaacagtccccctttggacttttcatgttaggtgtgttatggcaggccaccaactagcttcaaactactgttggaaaagattttgggactaggctagcccctctgtttaccacacagagagcggaagaggctgggggctcagtctttccggg

SEQ ID NO: 52681 - DNA, 370 bp, Mus musculus
  source 1..370: mol_type = other DNA
ttactgctttataatcgaagaaagcaagacatttatgattctttagctagtgagcagcatactgctaaatggagagtgaaaccagtcatggcaggacacattcaccagtaataaaggaattctacatcatgatttcctctaacctgttgatcaaaaatgatgactctaagaattttcctggctggtaccagatcagatgtcagccaatttttgaggcacagtgggttaccccgccctccctaagagtgggatgggaatggaaatctgatgcagtttgcacctttaaggcctctctagggagaccctggataaacagtccccctttggacttttcatgttaggtgtgttatggcaggccaccaactagctt

SEQ ID NO: 52682 - DNA, 400 bp, Mus musculus
  source 1..400: mol_type = other DNA
aataaattttagatttaatctattaacatttaactatttataatatacattaaatgctgtataactgaaaaacattttataaagtaagctattgccttcttagaaaatgtgcgctctctaaaatagaaataatgctagtatctacctttgaggtttcatgagaattgaagcagtggtatgctttacatttcgtctacttccactgtcaatgtttatagaaaggtaacacatggtggcagacaatgtgagcctggctctgggtgacagatgtcccttggtatatagattcatcgctaactcttcatacttaaaaatgaattaactcggctttccaggatggaattctgcccctgatgatacaaagagcactttacgtcaacgtctacgtaaaagcgtgacg

SEQ ID NO: 52683 - DNA, 383 bp, Mus musculus
  source 1..383: mol_type = other DNA
ttaattgggatattgactcagactctcagatgctatatataagcatatggcactaattccctcatttgttgaagttatagaaaggtttctcttaattaaaatgatttaactgcagaagcttctgtctaatacacaattaaaattttttagtaaatctttgaaaaaaatcagcaaaatggttaacagttggaggtcagcctgatctaagagtgagttccaggaaggctgcacagaaaaattgtgtctcaaaaaaatgttttctataaaaaaagtaaccaacatccttaccataatggtaggtgatttcctggtaatgccggctttgacgcgaggccacaccccgactcgaagccacgccccacgtcgccctgggcgcgcgcccg

SEQ ID NO: 52684 - DNA, 289 bp, Mus musculus
  source 1..289: mol_type = other DNA
ggaagataatctgatgatcggaaagctggccgactgcctgcagggtccctggcccttctgcgaagccttccaggtgagctggcactctgatcccagttctctgagctctctcggagcactgcactggggaccagttcattcacattctcaggtgacgcccttctgtttgcaagggcccgctgccggggcacctgtcttccccagagcccagtgctttaagcatctggccccggctcctgttgcagcccgtgattcttgtcagctgaagccaggcactggctgtagggca

SEQ ID NO: 52685 - DNA, 309 bp, Mus musculus
  source 1..309: mol_type = other DNA
actgtccctggagacccatcagcctgtcagggcttcccacagtgggggaggggttttctcagccactgggtaagctgtgaccctggtcataggctgcgtgccagctgggcactgtgtctgtcaggaatctctgaacgtcttcacacactaggcacccaatggctgcctcttggcccttagccccatgtacagcttttaaaataattatcttaattaaaaaaaaaaaaaaaatacacagagacttttttatgtttttattttttagaaataaaatgtgttaaccttttaattttatttatttatttattt

SEQ ID NO: 52686 - DNA, 276 bp, Mus musculus
  source 1..276: mol_type = other DNA
gagggagactcctggggacatccccggggatccctgagggggagctttggccaaagaagctgctgcagcggctatagtcagaagccccggttgggccagcttaagcttgggacccgctggtgacagtggctgaatgtgcaccttgggtctcagactcagtttccccgttcatacatacagggagtatgaagtcaggtagcctaagatctcccactcccccccgaactagcctttttgggggagtttcccagccctatttctgggatcccagagggg

SEQ ID NO: 52687 - DNA, 360 bp, Mus musculus
  source 1..360: mol_type = other DNA
gggcagggatgtatgatctagccttcgctcagcagtcagtgacagctgtcattgtcactgaggggccaggctcccagaccctgaacattgggagggtcaccctgagtgtggtccacagggtcatgtgacttttccaagacgcagcacctctgcaagaaggtgaggtcaccggcagcctcagggctgccgtgagggtgaagtgtgactgctccacaagtcatgatgccctgggctgtctgtttcctgacagggactctctcacaggcaggagtggctgttctcagctattgagaggaccgctcaggcaggcttagccgtcaggggaagggggacccttctggctcttccttaaaaggcagt

SEQ ID NO: 52688 - DNA, 362 bp, Mus musculus
  source 1..362: mol_type = other DNA
tatttctgagttcctttaacggtaacctaaacacagagacactggagccaccctgtctaagttaaccagcctctgctgagctcagcctggatttgcaaaagctggggatcaaaagccttgtatagacctgctgatagttaatagccccaccaaagaagacagttactctgtagtttctggcaacggttatcacgccttggccacaggcgctgggcggggcgctgaggggcggcgctagggcccgggggagcgctcggcaggagagcggtgcccgcccagcgcccgcggctcccgcttgggtccctagcggctaagggcgctgagtgggcgccgccgctgggcggggtgcagggatctcgggg

SEQ ID NO: 52689 - DNA, 390 bp, Mus musculus
  source 1..390: mol_type = other DNA
agctgccacagagggagacttttgtgcacctgaggcctccaggcctgttgggatctgccggccagcagaactgccccttggcccaggaccacaggcaagtccctgcctatttctgggccttggccccagagagatttccaagttcttttggaactctgaggaggggaccgagttccaggggctcacctccccctatggagctgaagatgtagaggcctcaggtggctctaggccagccaagcccaaggaaatgctccagaagccagcaggctgcatgcccgagcccttaaaaatatagacggctaatgtcttcagtatgtatgaaatatcccatatgctccgaaacaaaaggggctctgttattaaagttcagcctgctagagacagcag

SEQ ID NO: 52690 - DNA, 238 bp, Mus musculus
  source 1..238: mol_type = other DNA
aagtagaaggaggcagaggccactgcctcgggctactgagaacccagtctcctgtctgacagcctctgtccaggtcagtgctctatctgggagcccagcccgagaaccaatgacccagagtgtcatgtgctgccctcgctgggcagcccagatgagctcttggcggcctcagaggctctgagctgagcaaagaaggaggagccatgacagctcctgtggctgtgccacttcagagagg

SEQ ID NO: 52691 - DNA, 400 bp, Mus musculus
  source 1..400: mol_type = other DNA
ctcaggacctttaaaggactggcaggctgagggatggcaggcctctctaggcctagaataaatcttaggcacaaggcatgtacctctttgtctgcttgctctatgccacagaggggaaagatgacattttagtaaacaataaaatcagtacatgtcacagggacaggtacctgttgtcgttagtcagccgtctgaggaggccctggagggttgtcacccgcaagcgggacagaacccgcagccctggggcccagccagagattcctggccgcagcgagagctcggggtcatcgcctccgggaccctggccgcggcgcaccgccctcgcgggtcccgcgcctgacacccctcgggccggggcccccgccccctacccgctccgagaccggggtcaaaggca

SEQ ID NO: 52692 - DNA, 364 bp, Mus musculus
  source 1..364: mol_type = other DNA
tcatgcccccggtgtattgacagcaggctcttgtcatggtgacaagctccagcaagtctgaagggacagactgctttcatgtgggccttcaggaaatagcaggcccgtgctgtgcccaccaggcctctaggagattaggggcctctgccagaatcatttagggcctgcaggttttagtgtccccagggctcagccatctcaagtgctgggccgcaaatgacttcttaagatgacataagagactataaggttggaccccaagtatgtgcacacaagtatgtacacattatcttgaaaacaacgctcagagggactctgacaccctctgtgtcctcctctgtggggcgggacagtggtgccaccg

SEQ ID NO: 52693 - DNA, 591 bp, Mus musculus
  source 1..591: mol_type = other DNA
cagcctggtctacacaaagaataaattttccttaaatttagcctaagtcttttggaatggtatcaattccagtacacagagagctatatgcaatatatagtatatacgtgtacaggtcatgatatatgtaatatgaatctagagatgtatatacataccagtgtatgtgtgtgaattattgttattagaaggttatatgaaatgactattagatataagggttttatgtcatagccccaaattatggtctcatttcatctgtacaatggaaatcaaaatcaatctagtttatgctgtgtgaagcatcaaagataagatgcataatgcagggtaacagggacgtgctgaataatttattactaagctgctctgtagtgtgcaaaaccgggtaaagttacattacaaggtcgctccaggctggctagcctgaggttctgatggcggaagtccgtcaagctgcagcagcacccgcgacctggggccgagcccgcctgttctcccactaaccgtgatggaggtttcttccggaagcctgcccctctctcagtgacctcagagatacacttccggaagacggaagtgacccgtccg

SEQ ID NO: 52694 - DNA, 238 bp, Mus musculus
  source 1..238: mol_type = other DNA
ccaaggccttacacgcacacagtgtgagcctgggcacacacagcctcctataaagcatgaccagttatgatttgatcacagttagtctatgatgataagtgtcagcacaagcttcacaactaagcctctttcatccttcatttattcatagatgaggttccctggggaaagtgcctgcttctagaaccgtccaaagagcctgcccccttcatcctgcccagggaggcttaagaggtga

SEQ ID NO: 52695 - DNA, 213 bp, Mus musculus
  source 1..213: mol_type = other DNA
agaaatgtatgttgacacatatttctagagtgaaagctatcagcagatgttctgtttggggctcctagcctagctaggcgcgatccaaacataacactgaagggtaagaattaagatgcaggagactttttttttttttttttggtctagatcgggacacgcacttcccagcgtgccgcgcggcccggtgacgcggagccggaagagggggcg

SEQ ID NO: 52696 - DNA, 233 bp, Mus musculus
  source 1..233: mol_type = other DNA
ggtacatctacaccacccgcccagccctggctgtggcagaggcctcaggaggggccctgctgacagagtcattccgtcagcatttagcttcccctgtaacccagctgttgccagggcaacggggaggagatgaagttgccagggtaactacatcctgtctttggtctgttaaaagggccctcctgggggaacagggtccacttgctcctgggcccacgctcgcgaggctgtga

SEQ ID NO: 52697 - DNA, 271 bp, Mus musculus
  source 1..271: mol_type = other DNA
atctttagaggacatggattgtctcaaagaatggtctgagagcgaaatcacatgctcaagtgagtaacctattggtttcctcatccgtgagacggaaggataagcactgattgactgggcaattggctagtagctgagtgagctaaacacaacaaagacgatgttgttcggtgccctctctcaaggggggcccagagactccccacgggcttgggccgctccaatccgcagctctgcgtgcgggggcgcgcccatccccccgccgccgtct

SEQ ID NO: 52698 - DNA, 451 bp, Mus musculus
  source 1..451: mol_type = other DNA
agtcagagtacacagaatataaactttgttcgataataaatactcaggaatttgtccctgtattttaaagatttgtttttaaattgttccgaaaatgctttaggaaaaaaaacatatgtatgtttgaaacatttcagcaatgcaaaagtttgtgaagtttcccaaggttctcagactggctatctgcatatgcacatctcaagctggtggtcactgctgacagtgtccccatgctctgtgggcggtgtgaggctcgcctagggtcatgccaccactctccacctgtaacccaggggtgggtggtggggaggtccctgcgacccccgaaggaggagtcggaaccccaagctgggaccggaccgtcatccaggccgcgccctccgggtccccagcccgctggcctgcaaagccgcccggctggggccgcggacggcccgcggctataaaaggc

SEQ ID NO: 52699 - DNA, 465 bp, Mus musculus
  source 1..465: mol_type = other DNA
gagtaactgatatacacaagggcgtctctgatggacacctggtaaagtttccaagcatccatccgtgcagtgtacacgtgcactgggcactgagggggctgtgttcgtgcctgagtgacggctgggcacacacccgaagagctacacatgtgtgcagaagaatgtgtgtgttgtgtgtgtgtgtgtgtgagagagagagagagagagaggtccttttggcagcagtgcaggccccgctcccccacccccccttcccaggctgcttgtgtcgtgggagcctcaggaccccaggggtgcttggagcctctgaggatgacttgtccccctggggctcactcctgttccctaaggggtgtctcacagctgttgtgagaagctgagcgaagaggacagcactgaggtcttcctgaccacagcaaggcagtgggggatgtcacctgaacatttagacaatgtgtctgaatc

SEQ ID NO: 52700 - DNA, 263 bp, Mus musculus
  source 1..263: mol_type = other DNA
tccttcctggaatgatcttcctgtaagatttggtttctggaatctaagaatatactgtttttacacagggtctccatctgtactcatctgtgtgtgggacctgcttagctaggaatgtctctcccagtaccggtcctcttcagtgaggtcactacacaaattgaggcacagagaacgcgcgcgcgcgcgcgcacacacacacacacactaccatggtaaagggaggctccatttgacaaggccactccccccaaagtgtgtgg

SEQ ID NO: 52701 - DNA, 228 bp, Mus musculus
  source 1..228: mol_type = other DNA
gttgtgtctcagcaaacacatgctctcatggggtgaccgctctcacctagggggataatgtcattttttggaacctagaataagtttggtttaggacataccttgaggccttctgccttaagggcagatgactctcagccaggctggagactcctgactcagaggctggagcctggccccagattctgtagttccctttcaggcaacctaaaaaacagacaggaacgt

SEQ ID NO: 52702 - DNA, 266 bp, Mus musculus
  source 1..266: mol_type = other DNA
gaccttagcagttgaaagtctaaagtggtcagaagcaatgctgtctcttgtctctgtcaccatcccttgggacagtgaacacttagtatgtatctctcaagactgaggaggacctggttctcacttgcaggtacacattcaagctctttctgaaggtaccctcagcccagcctaagtctgggttgcgtacccatgacttggaagggcatactgattcgggagaccctaaagcctgaatcaaagtctgttgttccaggtgtgatgaa

SEQ ID NO: 52703 - DNA, 325 bp, Mus musculus
  source 1..325: mol_type = other DNA
ggtcatgttgtcagtttatacatgaatgtcataacttgttttgaaaactttgtcttgtcaaatcccagggctaaacacgtgatctgctgcgctgcatgagaaagtcattatagtgactgctcactggagtgagaaggtgaggctgagctcagcctagctccgcccctgattgtcccacggccaggccctgggccaagtggcccagtcccagcttccggctctgggaagtttggccgccaacagaggcccagtcggttgcgcttgcgcgagggtcgcacgcaatcacgcgcgccggccgcttccggtgcgccgcgagggccgccgg

SEQ ID NO: 52704 - DNA, 488 bp, Mus musculus
  source 1..488: mol_type = other DNA
tggttccaggatccgaaaataaatgtaataaaaacttttaaagcattagatattttaaaagaagaaaatcagaatgcagtaagtacttccttaagctctgagatgtgttgagctttgagagtgcacaccttaacccctctctcctccgagtagaagaaatgaaccctttgatttttctccttaacagtcatggaaaggtggggtgaaatttcatatttatctttacacttccatttacaactttaaaagcagcagcgagagcctgtggccattcgaagccttcagaggcaagctgggctcgaggcgcgtccccacaggcccgaggatcttcagcgacccaagagcggccgaggggcggggctgtcgccggcgggccccggtgattggccaggggccatgccgccacgccacgtgactgccacgccgcgggccttgcccggctgcctcctcctcggggccgggccatgggcggggacggttgccgggga

SEQ ID NO: 52705 - DNA, 454 bp, Mus musculus
  source 1..454: mol_type = other DNA
cacagccagctgtggtggctcacagctgtaatggttccaggatccgaaaataaatgtaataaaaacttttaaagcattagatattttaaaagaagaaaatcagaatgcagtaagtacttccttaagctctgagatgtgttgagctttgagagtgcacaccttaacccctctctcctccgagtagaagaaatgaaccctttgatttttctccttaacagtcatggaaaggtggggtgaaatttcatatttatctttacacttccatttacaactttaaaagcagcagcgagagcctgtggccattcgaagccttcagaggcaagctgggctcgaggcgcgtccccacaggcccgaggatcttcagcgacccaagagcggccgaggggcggggctgtcgccggcgggccccggtgattggccaggggccatgccgccacgccacgtgactgccacg

SEQ ID NO: 52706 - DNA, 393 bp, Mus musculus
  source 1..393: mol_type = other DNA
tatatacctgtgtacagtgatccaggcagcctgacaacaaccatggtctcggtgagagatcgtctctctacactggatttagggcaatactattccctaaagcaagtgataatgcaatgcatgcattcattctctgggaccagcagtctcaagttcatgcgatattttatcatagccaaaggtgtccaaactctagtccttcccgcatggaggactgtagttagacttgttaactcttcttattgtccaagaagtcaacagtcattgtcaggaactgatgtcatcaggaagctgttaggctgcttcctaacccatcctgtgcacgagtgaggttggcccttatcagaccagggtgaaaaggagcgaacacgctgatcctcatgatcttaaata

SEQ ID NO: 52707 - DNA, 346 bp, Mus musculus
  source 1..346: mol_type = other DNA
ctagtgtagcactggattgtaaaaactgacttcagtggtcagttatgagtttatataataaaagaatctgccggtgcagcgggagggcccggaggacccgggggcccaggattaggaggccgcggcggcttccgcggaggattcggcagcggtcttaggggccgtggtcgtggccgaggccgtggccgtggtcgaggccgcggggctcccgtcaccaagctgggccgcctggttaaggacatgaagatcaagtccttggaggagatctacctgttctccctgcccattaaggagtctgagatcattgatttactacagccatacgaggggccatcatcttggccaa

SEQ ID NO: 52708 - DNA, 463 bp, Mus musculus
  source 1..463: mol_type = other DNA
tccatgcgtcttagactctagcaaggacagagtgactcagatggagtcttcctctacttttcagaaggttcaataagcagtaaaagacatgattgaattttttttcaacgggaggagccctccctctctggccttgctgtctggggagagagagagagagagaactgaggtctccgcagctttctcttttgctgttgcagagcactgcggctttaaaagcggctctaagcctcccggagcctcagtttccccagcgagggggtgcccgcattgctgcgcaggcacccggctgctggcccgggcaccgccacctggctgccggcctggtccctgcgctagactaggagcaggaaaagccgggggtgcgaccccaggctcgcgcggccccgcccccgcagccagcccgcctgccgcagccgggggcccgagctccgccctccacccgcccgccgggcgctccctc

SEQ ID NO: 52709 - DNA, 371 bp, Mus musculus
  source 1..371: mol_type = other DNA
gtacttacatataataaataaataaatctttaaaaaaaaaaaaagattactttgataagaaacatgtggaattaacatctgagttttcagtacccagaggtacatcccagaagaaactactggcagctttgtctaagattgacacaagctaaggtctattgagaaaatgcctgtatcagattggcctctaggcaagtctgggagggcattgattaatgatcactgtggaagggcccagctcactgtggacttcagtgattctgctcgcagcacagaagatgaggtgctgcccgccccgggaccagcggaggcgcggtctgggaacgccctcggctgctggatgactcagggagcgcgcgaaaggcgagggc

SEQ ID NO: 52710 - DNA, 297 bp, Mus musculus
  source 1..297: mol_type = other DNA
tttaaaatttatttattttatgtatgtgaatatgctgtcttcagacacaccagaaaagggcatcgggtcccaattgaattcaggacctctggaagagcagtcagtgctcttagctgggcctctgctcaagtcccgggatgagctggccagcgttttatagtatagaaacaaaaaggctttttgctggctatagagaacaaagagcttctttctggctggaaaacaaatgtgtttatttgtttcacatatatgtgtgttcagaagacagctttcagaagtcagatcaaggcttgctgg

SEQ ID NO: 52711 - DNA, 503 bp, Mus musculus
  source 1..503: mol_type = other DNA
gcataatattatgaagtttctataattgttcctttccaatccagtgtattcaaagggatacgaacagccaggttctttatgcgcccttaaagccctggacttttaattactagtaaccccactgtgctgcaaaaggggctttcattggcccaccgccggccggaagtggaagtgagcccgggcggggaggccgcaccgggcctgcgcagtctgcaggcattgcagcgcgcaggcgcagctgggcgtgactgggtgacgccgggagcgtgggctgcgcctgtcgcgaatccggttccgccctcccctacggagagagcgcccgagctccctttcccagagtgctccgcgccgtgaagaagcggctcccggggactgggggccggcctcggcggagtgacggcttccctccgggccggagccggcggcagtggtggcagcggtaccgcccgccctcgttcaccgcgccgcgacgtcgccgcgacgcggccgcccgcggccgagct

SEQ ID NO: 52712 - DNA, 239 bp, Mus musculus
  source 1..239: mol_type = other DNA
acccttttcctgcctactggaagccaatagggctggcttgatcagaccaatatgctcctgtcaagagcggacaaggcattgattgatctgtcatacctagctaagggcccgcagcagatgtcaggggccagaggcagctgagggatgagagagagaaaaggcacacccttgctctttcatttggctaaacaagcgtctcaggttcctaaactaggcggagactctgaccccaaagcgat

SEQ ID NO: 52713 - DNA, 360 bp, Mus musculus
  source 1..360: mol_type = other DNA
ctgtcacgttgaaatgccagacattaggcctgaggtcacagtcttcaagccaggctggctgcccttgtcccagaggcttcagagaggccaacactggggtatatccatttgtaacaaaccccaccctggtcttggttactctcagctgtagattctgagccaccaggtggctgctgggacccatccagtggtcactggccagagtccccgtggacgggaggactggtcccaaatgcttcctgaccttagggaaggtagagcaggacgctgcatcccgggaaggagggtgtatacagcgccccacggctggtccctaggggcgtggcatcccaggaatcccttggatgctaagatggggat

SEQ ID NO: 52714 - DNA, 350 bp, Mus musculus
  source 1..350: mol_type = other DNA
gactcagagctggtccaggaagtcaccaactcctaggaggagatagcccgcagatctctcagagatggtgtcttcgaggaaaggccttgagctgagcctgtaagctcccagcagggcatgcctgactccaaaagcctgcccttctgggccccttgtcccgtcctgggactcggagcagcgggagaggagtttgccgagttcccaggctgacaactggcagccctcatgggggctggagccaagccctcggcattgtctgaaacctccaaatttagaagaaatatgaaacagtcacgtggcaggcgccttggccaatgggggacccagggaggacgcagcacccgccttgc

SEQ ID NO: 52715 - DNA, 307 bp, Mus musculus
  source 1..307: mol_type = other DNA
ttgccagctctgacatggctcgtatatctaacttagactttaagtagtgtaactccccctgggtggagcacactgtggggtgtgttgagttctggataggaaccaggcccaaagctattcaggtctcagtttccctgcctgtgacctagagggtaggcagccaagctcacctgaggctggttgggtcgctgtgggtgctggctggtcagccagccgcaggccacaggcagaggtgccatcagccaggattgtcctttggtcaacagcccctgggcactgtgctaaggcacagccagctgggggccca

SEQ ID NO: 52716 - DNA, 231 bp, Mus musculus
  source 1..231: mol_type = other DNA
atgcacatggtggttcacatccatgtttactgttgatcatcccccactacatagtgaggttcctacctgtctctaaattaaatagttaaaaataaagggatctaacgcagacttgtttgtttcattggtcagcgtgattgagctctccctgagacagatgtagcccagccaggctgctaggccggatcgccagtggggcggcagggcggggcgcacagtcgagcgccaacc

SEQ ID NO: 52717 - DNA, 259 bp, Mus musculus
  source 1..259: mol_type = other DNA
caggtaatgttaacttcaacctgcaggtaaacactctggaggaagtacttcggccttgaatggctgcatcccataattatcttcagaggcatgcactgcatcgtatcagtcccccacagttagcttccctgtcgttagcggggcaagcaaccgtgaggctgtcactgctagcccagggccagtgcggaccgggacactcgcaggggggcgaggcgtgctcgggtctattccgggagcgcgcagggcggggcggggccct

SEQ ID NO: 52718 - DNA, 337 bp, Mus musculus
  source 1..337: mol_type = other DNA
ttctctgtacagcaaagtgactttcttggatcgaccactggctgtgcactaagttactcaggctgggctcaatcttgtgatcctcttgccttaaaaggaagtgactgagattacaggcctgagtcactatacctgttgtcaaattactgtaatcataattaaacaatatagttctgccctgagagcgtttttaccaggtgaagtcggatctctccaagtgggtcccaggatcgaacccacgatgttgaggctccgcggccagcgccttggcccggggagccatctcctcggccctcgctgggaagtcccgtgcctgctagggggggctcgagtgcgc

SEQ ID NO: 52719 - DNA, 511 bp, Mus musculus
  source 1..511: mol_type = other DNA
acagctctggtatgtcagtggccatgcaaatttcctggttacaagtcagagttctctaactcacagtctttttattcattctcaggaatgaactaacacaaaacacctgttggtgaatcactactggttataacttccttaaggcttaagtctggaggagttagcaaatttccctaaattccaggtgcaatagtaaaaagaactaaccctagttctacagatggtcatctgggacatggcctcggatccagtcatcttccaaggtagggcgcgcctatgggcctcagcctcccttgcaagagccgcggcgtggacgccgggtcatgggacctgcaggaggccggtcctctgcgcagcccagctaaccgtcgctttccttcccagggctgcccatcgccgcgctcccgccgccgcctgcccggccccgccgagcccccgaggccaggaggcgctgcagccgctgcaccgcccacagcgaacacgcctgcgcactcgagccccccctagcagg

SEQ ID NO: 52720 - DNA, 390 bp, Mus musculus
  source 1..390: mol_type = other DNA
atatggatattcaatacatgccccttccagagtcactgtatggactaggatggtatataaggaatgtgaagaacctccactgtattttggtcagttgtcaccccaaaatttataataataatactaaggtggcccagcatcatgaggctatatacctgctgccttcctcagaagggagagagcgggtcacataagacaagggtcatttttgtcagcaacttagctgacacctacttgatggaggaggccacagttcagtagggacctacccaaggctaaactgcaccgtcagccctgggctgaggtgggaggtcatctcctccaaagcccagtgcctgcagggcggagcctcagacacgcgccggcgcgtccagcaggtggcagcagcga

SEQ ID NO: 52721 - DNA, 315 bp, Mus musculus
  source 1..315: mol_type = other DNA
gtctctagagagcctgaggcacaagccagccaggaccctgtctgcagtcatggccgattggtctagcatgaccagttctacaactgggggctcatgtagtccacacagttcgccagccagtactggcttcctgacgctccccaggccaaggcctgacagtgcgaggactatctggcctgcaggctgagtggcccctcccaccctccctggcctccccactgcaggccggatatcaaaggctgcattgtgcgcctcggtcccccctcctcgtgtgccagggaggaggcggggaggagggacaccaccgatgggagg

SEQ ID NO: 52722 - DNA, 415 bp, Mus musculus
  source 1..415: mol_type = other DNA
aatgtagtttaattttttaaattgtaaaactgaaaatggttgcacttgcatttttattatgtgtatacttctaggttgccaaaaaaatattttttcacaaagtgtgctgagaaactctcaccggtgctctgttggaccaggagacagctgtcatctctgctctttctgttcctaaaagaaaacgcgagacctctcagcccgcacaggtgacctgaacggacaggcggttgcacagcagccctagatttctctctctggtgccccagctagggtagctggaagggagcggtggcctggcctccggggagccgctgggccccgcccgggctaaccccaggaggaggcgggctaggctgggagggttggcccttggtgcctcgcccctccgggcatccggccgtgccattggcccaaa

SEQ ID NO: 52723 - DNA, 427 bp, Mus musculus
  source 1..427: mol_type = other DNA
cgatgtgatagcaacatagcgatccactgcaatcacgcacagggtctcgatgctggctgtgatgaccagcacgttgccaaacacgatggccaggacgataaccgacatgaggatggccatagggcaggttagcaggtgagcgcaccggctttcggtgcccaggcgctctcagcgggtgcacctccgacggggcgcagccggccgggggcggactcctggaagcttcattcagcggccgtacgtcctgcacactcagctcgtgggtgctccgggctcgcggtgcctgcagccgcagcctgaatgcctgagaagcagccttgcagtgcgccctgcctttgggccaatggcacggccggatgcccggaggggcgaggcaccaagggccaaccctcccagcctagcccgcctcctcctggggttagcccgg

SEQ ID NO: 52724 - DNA, 247 bp, Mus musculus
  source 1..247: mol_type = other DNA
ttaaaatgcattctcattcttcttgagtttcaagaccaaagtgtggacactttgccccttcttaaaattgggaagacccagatatggctgtctcttgtgagactatgccagggtctggcaaacacatggcctagttggccaacagtatgaaataaatacccaattaaaaaataaataaaatgcattctctttctaattaaagatctgggctttagagccacgttgtagttctgcctcatagtgagga

SEQ ID NO: 52725 - DNA, 362 bp, Mus musculus
  source 1..362: mol_type = other DNA
gaaacgcctgactggagccagaaggcccctcccagacaaaccctgctctgtgccaggccgagtcaggctccccagctggccagcccagggatgtgagatcagggcagcctctgcgcccacttcccagtgcgcccctctgcacaggtggcactccgcgtgccctgtgggggcggcagcgagccggaccgcagggacacccaagctgggggctgtggagcctgccgaacccggcttggttaggagcaggaggatgctctgcgtgcccaggtgagcctaggctggggtctccagcccaagccagtgccaggtgcccgccttcttgccttttcccgagcgcgggggctggagccggcatccagggg

SEQ ID NO: 52726 - DNA, 499 bp, Mus musculus
  source 1..499: mol_type = other DNA
ttaccatgtgcacatatatacatatgtaatgctgttgttttcctaccagaactccaaattgggatacatggttgatacctggagctacagcccagtgtgctaacgctaattcttagttctggtaaaaattaagaataatttgaacattgtgcacggtgcaaattgttagttacaggcctgaaaatctagatttcagtccagttttgtgacattgtgacagctatcttcactttagacaatgtagagctgctcataagccaaaggcccagtgttacatttattaataaaacattgatgtgaaaatcgtcatgttcaagagactatagatcataagctcgcaaatcacagaatgatttaatattttcgctggaaaatatttttattgcacctattcattttgccaatggctccaggaaatagattccgggtatttccggtagggaacctaacatggacgcggtgaggcccgcccaggcccatccctccacttcttcggaag

SEQ ID NO: 52727 - DNA, 383 bp, Mus musculus
  source 1..383: mol_type = other DNA
gtgcttttccggctttacagaaaccctactgtatctcccatttgtgattctacttcgagatacttttctcgaaaagggaatagtgggacaaaaaccagggtctcccttttctttcttttgaattaaccagttcctcgattgactgactcaaacgactcaacattaaaatcgttgcatgggccccaggtctggcccaagtctcgcggcctgaaaggcgctctaggccccagagttcctgaaccccgagatcgaagatctgggcggtgggagccccggacccctccatctcgcttccgccgcctctagcgtcttccgaagaagtggagggatgggcctgggcgggcctcaccgcgtccatgttaggttccctaccggaaataccc

SEQ ID NO: 52728 - DNA, 367 bp, Mus musculus
  source 1..367: mol_type = other DNA
cagtataaataatataaacaatggtacagtttccctaagggtccagtagtggggggttgggggtatagtaattttaggagaatctacaactactgtttgaattaaatcctcatagttgttaactatatatttatgcttatactaacacacgtaagtagagttctcatccctccttaataagaaatgtctccttgtaacagatggagactagacaccatgaccaaggcaagttttataaaaaacaacatttaattggtcatcaaggtgggagcatggcagcatccaggctgtcatggcgcaggcatggaagactgctggggtgagagtcttaagcccattactgatagatctgcagtgaaattctact

SEQ ID NO: 52729 - DNA, 366 bp, Mus musculus
  source 1..366: mol_type = other DNA
tttgacagacaaatagcaggcgtgcctcaatgcagtatataatatggagacatagtaaaaatgaccatatccattccatgtcctctaaagggtatctctcctgggatgtaacatttacttcgtagcatctgtaagttatagaaatctcaaaaatacatgtaaccataatatgaccacgcttttccttatccaagattatatagctgggagatgttagattgtctccagtagaataaatcacgcacgtaatattcttttgtttcttatctaaaacaagaaatccatgcttgatcttttctgtgcaaagcttagtctaagtaactgaatttggctgacaggtgtggcagcaccattcagggtgtggcg

SEQ ID NO: 52730 - DNA, 341 bp, Mus musculus
  source 1..341: mol_type = other DNA
agtttacactgaggatgaattttaactgcttagtaacatggtttactaactctaggcatccctttatccagtcaaattggcaactagatctagttccacaaacaatacatttactgttttggttgttgaaatggttaaaaagtgtccaacagacacaatttcctggctgtaacttaaaacaaaacacctaaaaaaatttcttgttaagttaggcatatgcatattagttttattttagtatttggtctaatttttctgacaaaaccatgaggcaaaattgttgagtcacaagtctttaaatttgttttgttcctaactttctactgagagaatcattaaga

SEQ ID NO: 52731 - DNA, 265 bp, Mus musculus
  source 1..265: mol_type = other DNA
caggtaagtcagctacaggactgtccagtacagataaagttcaatatgagtcatgcaattttctgtgaaaatttccccagtttgcagtctaaaccctgcatgcagagaaaactgtgttctccagagagcccagttttccagagctcaggaccctccggtctaaaacttaagtccaggggcgggacttaaggcgtggcctccctgacactccgcccctccccggccctgcctccgagccgcccgcggcgctctgcaaatatgagga

SEQ ID NO: 52732 - DNA, 228 bp, Mus musculus
  source 1..228: mol_type = other DNA
tgcctcggcctgggcccacttgggcaccaagcctacagtgtgtggccagactctctcagtatctgaggcagtaatataactagaactagtaaaatgatgagtgatgcgcaaagactatcatagatttagtgactgttttttgttttccaggactagtaaagacaagtactcgacatatattaattgctccttagatatttgtaaagtgccttgcgcgaggcctagccc

SEQ ID NO: 52733 - DNA, 389 bp, Mus musculus
  source 1..389: mol_type = other DNA
atgcatgtcttgatacaacgttatttaaaattaagggcgatgcttttttagccttaggatgtcagctcatatagatggcctactccaggcgccttcacaatgtttttaaatttctctgtagtcatttatacggtttaaggggtttaatttattggtccatcccattaaacaagccctgaggactactgaggaggggataggcttcatttttagataatagaaaaccaagaccggagtctcccatcagatttgactaggttttgcttacaaagcaattaattccattatcatcatacaggggtgcaaccgggacgcgccccacgtcggtgcagggcgcctacttcgccaggcacgcgtgggcgggctcggcgctgctaggagccgccttc

SEQ ID NO: 52734 - DNA, 283 bp, Mus musculus
  source 1..283: mol_type = other DNA
aaatcgaattacttttctttactcaaaaaactattgggtgactttcatgcattttttacatcctatatcaaatatatttttgagaatttcatacatgcctatgtgtttctccagattcctgaagaagggaacacccatatcgagtgactcgcccgtcagtctttgaggcccttagcgcgcccttccggcagtgagcgcctcaggtggtccaacgcgcgcgggcccaggctccctcagcgcccgcgcggtggctgctgggtgttgcgcgccttgcccctctcgc

SEQ ID NO: 52735 - DNA, 295 bp, Mus musculus
  source 1..295: mol_type = other DNA
aagttggcctcgtctttaaaaaaaagttcatttgccttagcaattagggacatgcaaatcaaaacaactttgagatttcatcgctctgcagtcatcacagccttgtcctgctgaccagaagcaaacagtaaaatgtaaacttttatcaccctgatccaggaaagacctgcagtctagaccccatagtaaccagaccacgcctgcctggactgggcgagttgagaaaccctgagcgttttccacccagttgcagcggcgtcacggcagttgaggccggtgtcagccgatttacggc

SEQ ID NO: 52736 - DNA, 325 bp, Mus musculus
  source 1..325: mol_type = other DNA
aatatttaggtgacacaaatgtcttaatggatttaaatttaagtgtattgtgcaaaaattctcaaagaacaaataaaatattcttcaagaatacgaaattatcataaatttcattgtaatgatcagtgcttagccctaagtcataagtacttagaagatatatgtctgatgcctttgagagttactactagttctcttgtaaagttgaagcaacttgataacttaatctattttccattgcctggtcattcattgctacaataaggaaggatcccagcattccggagacaaaggcaggcagagacctgtatctgtgtgtgttcca

SEQ ID NO: 52737 - DNA, 502 bp, Mus musculus
  source 1..502: mol_type = other DNA
tgtttctccagaacgtcttcgtggaggatgctgtgcttctagaacactctgttctgcatttactgagagcccttgctgatgtctgacaggagtatggaaagaatcccaatctcacaatagcttgtgaagtgataaggcacaaacagacttttttaataaggatgtctttttgatttttttctttaaatgtataccttttatttgtaggaagagcatgctttgaagaaacagactaagctatacattacaataaaaataaaaagtgttgtatagtctgccgggctgtaggtggctccccagacctagcagagttctcttttctgtggaggttgtaacacttaagcagtttgtcaaaaagttttgttatatcaagcatacttgagtatacactgattgtcatttcaaatttaaatatcttcaacagaggacatatgtcatatgtgacctttggagtaggaagtttctcactaagtatgtccactcagtgggttagctcacattg

SEQ ID NO: 52738 - DNA, 487 bp, Mus musculus
  source 1..487: mol_type = other DNA
gttttaaaccagtcaagccttccatgcttatccttttatgtaagtatataagacgttctagaatattctctagagtgtatttttaagcgatcttccttgcagagatgctgcagcaggtgctgcccgtgggactccaggtgatgcatagaaagcttttaaacgtttgtcttcctaaaaaacattttcactgcctctcgaaacccagctggtatcgttctatttcgtgatgtatttcctaaagtaatgagtgttattggaatgggttccagcagattagagttcattaattaaatcctcttagatcgaactgtaacactattccaactcgctgggaacgcgctggggagcctgagcccgcagccggagacgcactgctccttgtgctccacccagctccgggccaggctcgaccctgccccggggtggggtagggagcgggctcccgcttctctcggggctccaggtcgttctccacccccgggccctc

SEQ ID NO: 52739 - DNA, 423 bp, Mus musculus
  source 1..423: mol_type = other DNA
cctatctagcaagggaaaggctggataacattaaatatgttgataataaaattgagtttccttgtgataagtatggacttctggtcagaaagatgtgttgggaggtagttcctcagtataaagaatcaaactcatttcaatgctactttaatttcagaactcacagaggcaggtggatctccgtgagttagaggacaacctcaaggctagaaacacaatgtccagcatgaattccaaacatccactgtgtagaaatattttatttcacccagaaaagtctctgacttcgcaagctaagccatgcacatcctcggtagggagtgcattcataactaacatgttagctagctaagctgggaagagaacagcacagggtaccttgctctatattatgacgtcatctttgagaagtgttcagctgtt

SEQ ID NO: 52740 - DNA, 305 bp, Mus musculus
  source 1..305: mol_type = other DNA
tctgcagcagtgacgctatagtaaactaccgttaccatagtagcattacacaatggagaaaacgttaacatggtgtaaagttattatccagctgacatttggacatatcaataacttatcttacatttgaagtactcactaatgagatcaaaaacaccaacgtgtgctcttcctgatagacagggttctatctgccttgggcaccagacaggtacataaaaaataattaaaataataataaactgttgatcagttgcagatcagttggctactgagacaaaatctttttttaaaacagttgctgt

SEQ ID NO: 52741 - DNA, 347 bp, Mus musculus
  source 1..347: mol_type = other DNA
tgctaggatcctgtctgcaagcataacagagtatcattaatagtgtcagggattggttcttatccatgagagaagtggccactttctgtagccagtcctctttcttctctggagacaaggaaaaagggttctggcgccgggccagttgcagcttccaccttctggctgccccagcctacaagccccgccctcctgggcccgccctcgggggtggacctcctgctggccccgccccggcgccgacggcgccgggcgcagtgatcaggcgctgtggcgcgggtgcggagcgctgccaggtcggcgttcccgggccttgccggagcgccgccgcagaggatccctggccg

SEQ ID NO: 52742 - DNA, 234 bp, Mus musculus
  source 1..234: mol_type = other DNA
tgctaggatcctgtctgcaagcataacagagtatcattaatagtgtcagggattggttcttatccatgagagaagtggccactttctgtagccagtcctctttcttctctggagacaaggaaaaagggttctggcgccgggccagttgcagcttccaccttctggctgccccagcctacaagccccgccctcctgggcccgccctcgggggtggacctcctgctggccccgccc

SEQ ID NO: 52743 - DNA, 313 bp, Mus musculus
  source 1..313: mol_type = other DNA
aattccagccaatttctgatagtgactttctctgctatgcagcacgaggttgcctagaagagttagccaagcgcttcctgtactcctaactgtgttgggaacactacaccggagtgaggccatccctcgctatcatattttaaatcatctgactacatcaactaacgcgattaaatattatataaactgttgttctagctcattacaatttattttttaaagcatattttgactgacttcttcagctgcgccagttccgtctcccgagcccagagaaatccgcgaccgctgctctaggtgatctgatgcaacg

SEQ ID NO: 52744 - DNA, 370 bp, Mus musculus
  source 1..370: mol_type = other DNA
cccatgacttggaaagacccttagttccaagaacaagggcatggtcatctcagattttctggggcagaaggagtctgggctggaatacgtctcctaagcctgcaaccctggctgagcctggtgagaccctgtttacacataatgagactctgtcttaaaatgttaataaataaaataaatttatttttaattaagaaataaatgaaatgtataaatacctacacgcatataaaatataaaatcaatcatttacaatttttaaggattttattttttgtgtatgggttttgcatccatgcatgtctatgcaccataagagtcttgaactgtggttcaatgatcctgtgttcacaccaaatttgaaactctg

SEQ ID NO: 52745 - DNA, 440 bp, Mus musculus
  source 1..440: mol_type = other DNA
taaagattggagtttaaaatttaaataaaaatacaagagagtttattgttcttaccttacagaatattttgcaaacagaattgcaaagatggagatctcgagattagagagatgagctgcgcgctaacagttcatctcaagcaagctctctcagcagaaagtgagcttgctgcaagtgacagatcccagcgcggctcagccagttttccgagctggcgcggtcaccgaccccggtctgcggccaagccgacaacagtttgccacctgcctctggggcccggcctggcggcccagcctctctccacccgggggagggatcgagggagggcggacggcgggaccgcccccggccccagctccagcctggtccccaagccgagcgcggccacggccgctgccagggggaggcgagaggctcctccctggagcagagaaaccag

SEQ ID NO: 52746 - DNA, 554 bp, Mus musculus
  source 1..554: mol_type = other DNA
ctggaattaaaggcaccttctaggagtggcaaatttctcttatttaaagtagcctcctgagaaactccctatctggaacgtgggaagattcctacggtggagacattcgtttgcatatgtaaaggacaaacttaaactggaatttggtatttcacgttgtgcctcacaaaaaatgagcttgccacaccggggcagcctctcctaggctggccgcccagccaggaaaatctcttgggcgagctgaagctgttagccaagtctggcctgccatagctgcctcgtcgctctcttttagagctcctgataaaaacggacatagtggctttgttgttgtttggtccagttcacagaggagggtcagcccggcaggcccagcccgccagggcgcgccccagctcagtgctctgtgccgggtgacccaggaggcgcgggggtggggtgggcgtggggcgaaacaccaccacccccgcggcccgccccccagcccggcctgtgattggcttggggggcgcaagtgcccgccccggcgagcgggagggtccccgtgggcgccg

SEQ ID NO: 52747 - DNA, 433 bp, Mus musculus
  source 1..433: mol_type = other DNA
ttgttctcaagaacaccagggcttccctgctctgtgtaggacaggaaggaggttgctctgtgtcactaagctaaaagccagccagttttagtgaataaaaataaaagttcctttggtctttacaagaaatgtcccgagggggcattcttgcgggaggactgtccttccttgctcccagatactgtgtcactcattgtaaaggagggcattccaaatagctgagagactcagaggttttaaaacttggctgttaacttccaaggtgcagtttggctgcagggcagcattacagagcttgagttgttccctaggtctcagacagctctcagcaccgtcagctcagcacagcttcagagggctctgcctggtgggaagctctgcagggctctacctgggcagttccaggctgtcgattgccggtagggaaactgga

SEQ ID NO: 52748 - DNA, 191 bp, Mus musculus
  source 1..191: mol_type = other DNA
gaaccggtgaaccgctagaaaaaaaaagtgctaactgtttttatttcattcttttgggtgtctctaaattcaaagattcccataattttcttgaaccaaagaagtgatcacatttgatcaccctcttcctggaattcaaggaaacagatcccggggctcttcagcgtttggaaccactgaggatctgtgac

SEQ ID NO: 52749 - DNA, 297 bp, Mus musculus
  source 1..297: mol_type = other DNA
ctctcagagggatgagttttcatatagcctagactggccttaaactcatcatgttgttgagaatagcctcaaattcctcaaaattttttgcctctttccccaatattccattctctttttccttactactgcagccaaaataagaagagatctgctcagagtaagacccctgggctttgcagagagccggctgtccccagcagcctgtcagtgacaactcctctggagttcagctccctgggactgggtttcatccttttgccaggggcaacaagttactgctcgataaaaaatttc

SEQ ID NO: 52750 - DNA, 501 bp, Mus musculus
  source 1..501: mol_type = other DNA
agaactgttggtctatataatccacagtctgatctgaggacacaatatccccaggatctaattagttaaaatacactagaagtattttgctgctcagaaaatcgaatctttttaaaagtctcgaaaagatttcggtcctccacttgcagaggaagcgtctgaggttgcccaatgggctgagctggtggcctcttgggggactccgcacactcgcaagcccaaaggtctgctgagagcggacgcgcgtaggggcgcctccgggaagcgcgtgctaccctctccggtgtgaggtaagcatcctcccacggtcccgggaagctctgctccactgactctgaagcggcaggggacgtgcggcctcacgccccgcccatactatgccgaccgaggcagcggtccagccccgcccttgcctcccggcccgggtcgggacaggacccgcccccggagcccgcccctcttctccgctggcgccccgcgcggcttcacagggggaacctg

SEQ ID NO: 52751 - DNA, 177 bp, Mus musculus
  source 1..177: mol_type = other DNA
gaacagcttaggagtcagctctcttccacgcacacaagcagactgcattcatgggctgcagtccactaagtaccttttaaaatgtattttgcagagattggagctctgcagtgcctgaagacacttttgctaaagccagatagatatctgatcacagaaagtcagaggctggatcct

SEQ ID NO: 52752 - DNA, 659 bp, Mus musculus
  source 1..659: mol_type = other DNA
tgttcgctcgccgcccgggcggcccgagcgctaggccccggcgtggcccgggccgagccaccgccaccgccgccgctgcgcggcctagagcccgcgcccgggggagcggggccggcggtccgggcgcaccgcgaggccgcggcggcgaggagccctggggcggcgaggccccgctcggctcttgcacacagaccccggcggcggggaggcgcgacacgcccgtagcatggaagcctccgccgccgctcgcactgcagcgggcgcagcagcagcagccgccggcggcggcgcgcggagcagaggtcgcccgagccacggccgggacacccgggcttgagcgctgcggaggcccgcccggccagggggtgggtgtgcgcctgggacacgagggcgggagggggcatttgggcccctcgtgccaccccgcgggtcacggcgagcgcgcgaggctcaggccccttgccttggcctgagtgcggcggcctgtcccaccctggctttggggacaggcggccttcgcgccccagccagcgccttgagggggggccgaggcagggccgctgtggctaggccccaccagctccagtgggggccacgtgagcgcgggctcgcctccccctccagggcgtgcacccaaggcctggtctccccccccaggt

SEQ ID NO: 52753 - DNA, 313 bp, Mus musculus
  source 1..313: mol_type = other DNA
tctgctagaacactttgagatgatgttgcatcttgagatcaaaatgcagattctgtatagtttagctacatctaccccagtagaacctaagttttaacatctcagatacctagaatactggaaattctggacttggaatttgaggtctattccataccctacaacttaaccatggctatggcttcatcatgtataaaataggatggttacttactcattcagtgaatatccgctcgagtagctgaagcttcacagcaggagccctgcacgcaagaccatggtcacgtggcctccaggatgcgggctggtgggc

SEQ ID NO: 52754 - DNA, 339 bp, Mus musculus
  source 1..339: mol_type = other DNA
taaaaacaatcttaaaatcagcattttttttcttcctccctggagccagatcaatgtgttatgtgtgtgagatcactcaagaaaggcacatgccaggaattcgcaggagagtgggtttcccgcccccccccccccgtagctctctgcctgcatctggcagagcaagtgaggctactgctgttgctgctgctgctgctgctggggattgccaggggcaatggatggtttcccagccaggcatctgggagcgcggctcgctatagagagacgtcagtgcgctcaggtcccgggtgtaagaacccccggcccctcccgcgcaggcttcctttatataaagtc

SEQ ID NO: 52755 - DNA, 328 bp, Mus musculus
  source 1..328: mol_type = other DNA
cagtgaggctgggcatcacccagactctggactctaaccatcagctttgaggggtgcagtgctcacagttgctttgagtcactctgggtcaagcaagcctcaaggggcccccaaggagaaggctccgtaatttggttaaggatcctgacccttaaagatagttcatgagaggaagcgtgtcttctccgaactctcaggtctgtgggtacagactgtctcagcaccatttctgagtggtgaaccctgggaggtctctcccagggaggttcggactggggtggagaggtgcctcctcctgtcaaacctcccaccccggccctctataggg

SEQ ID NO: 52756 - DNA, 211 bp, Mus musculus
  source 1..211: mol_type = other DNA
gggttgcaacccacaggttgagaaccactggattaaggtcttagctacactcagttcttacctgtgcagatcacataggatgcacactgtgtataaagacggcgcttctaaaagcactgcttttgcttcataaagcatccaggggtttcacagagaccatatgatcagttggctccagttaatatcattgagctggcctgacatgcacaac

SEQ ID NO: 52757 - DNA, 422 bp, Mus musculus
  source 1..422: mol_type = other DNA
ttttttcaagtttattttagtcatcgttaaacaaaactgggtacaatacatgttatgaaaatttgagcctgggtttgtgagcttgcaacaaaactaccgagttttatttgtgtgaaattcctttttgagaagtaaagttgatttggcacaaacctcttatcgaccacctaaaaggtcctagggctcttttgaggtaatcatttctggaaagttcacaaaacaaaagccagccactgaatagtagatgcctttatttattagtttatctaagtcacagaagatagtctgctactccctgccccggaccccagactgctggagtcctagtggcccccagtagcgaggaggccaggggcggggctcatccctggcccgcgggtctctcgggctcccagtgagcgccctggccgcggctccagagc

SEQ ID NO: 52758 - DNA, 296 bp, Mus musculus
  source 1..296: mol_type = other DNA
ttcatggtctgacactttgaacgtcacaggtatagtgtgccaggcctgaaatcttaattcttggcagaatttggtatatatgagatcctgtctcaaaatcttgcgttatggactctctgtaactccagttccagggaatctgacagcctgtggctccagggatctgagctctagtccttgtgcttgtacactctatagcctaagctatccttaaactcatgaattgcattagtgtgctgaaaattatttacgagacagaatttctctgtgtagccctggctatcctgtgctgggat

SEQ ID NO: 52759 - DNA, 304 bp, Mus musculus
  source 1..304: mol_type = other DNA
cctcaaaggccgaagacatgggaccttgatcctctcctttggggacacctgcgaagcctttttaaatggtgtaccctgggcctgtgcacacgtttaattttaaaaaatcttttcttaaagagatcatgagtttcaacagttttgatgtttgtttttactcggtgacagtggtacactctgtaagccaagtgccaagtatttccttgttgctggctgtattttcaaaacaaaacgcaaaaccggctcatgagcacaagtgtcagcgcgcttccaaagccctgcttgacaggcccgaagacttcag

SEQ ID NO: 52760 - DNA, 432 bp, Mus musculus
  source 1..432: mol_type = other DNA
aatcactatcaaattatttctgcattttaaaagcgacagtctttaccttcctccacaaaggatctggacccatcgtagatgaaggaactcatccagaggaaatgtcctcggaacgcttctgcctagaaccacattttagaattcgaaaagttttcgtccctaattggcgaaggtaagaatttcttagccactcctgacgggcgccacctcccaccttcctttttttaagaaagcaatttgggggttgagcaggactcgtcctccttgcgccctccgccgtaggtcggcgccgcggcgatctgaggcttgccccggcaagttgcgctcgggggcgtctcgagacctgctccacttcgctcggttcccgcgccgccgccgttcgaaggggcggggacacgggcgggatgtcgtcacatgacgtcaccggagaag

SEQ ID NO: 52761 - DNA, 464 bp, Mus musculus
  source 1..464: mol_type = other DNA
ggcatgctcttaggtcgaccaatcagaaatgatgggaggaagacaagactccccccccccccatcctagagggtctgacaatctgcacttgtggccttgttcggtcctgaacgggctgggaaaaggtaccagttaggtccctctaaaaggggatgaagattgaccacgggttaggctatttggaagggcgatataggagacccctgtagccgctgctcttcgttatggaagttaactgacaacaggaaggaagcctcctcctcctaggctgagaccttgggagcgcctggctgcctcaactctgcactgctctcccaggggaggaagagggaagtcaagttcagcttgtttgtgactcacctgaacgtccagaagagattcccgggactcccaaggcggaccccccccccaagtttgagcgccgcacgcaggtggtgcaaacgccccagctctccggcgccccc

SEQ ID NO: 52762 - DNA, 419 bp, Mus musculus
  source 1..419: mol_type = other DNA
acacacacacacacacacacggggtgcgggggggaatggggatgtgcactcactggagctagcctgagtaagtacggagccaaagtgtttacagtttcaggttgtgatgcttccaactatggaagatgcagaatattatcacattgttgatttgtctttcacaaatgccacttgaactttttaaaatacagtacagcatactcatctatttaattaaattactgcctgctggcagaggggcagcgcctgcttcgggagccagagctggctgattcccgaggatttcaggagtatctcagaatgtgctcgagcaatcaagtcatttctcttaaaacttggaaaggaaaatcccgcccagcagccctagccactgagccggttgctgcgctgtaatcatctgtgcaagatcgatgtctcag

SEQ ID NO: 52763 - DNA, 255 bp, Mus musculus
  source 1..255: mol_type = other DNA
gctaagctggatgtatccatgataaggaatccttttttgtcttcccaagggatgtctgcagtgatggtcacggctggaatcaaggcgtgtacagagcagggtgctgtttaatatcgggagttttgctcactcatagaaactaacattttcaacagtgtttaacaatgctccttagtctctggctcagccctagctagtggtacttatgataggcagccaggtaccagcgggctggccaaggcccttggtcagctc

SEQ ID NO: 52764 - DNA, 292 bp, Mus musculus
  source 1..292: mol_type = other DNA
aataaagctcctggtgtcatttaaaagttttatgtaaattaaggaaaaaaaaaatcagcacgcaggcggtttctgagttcgaggccagcctggtctacaatatttaactggcacttaactgtcagctagtctggacagagttgaaaagtctatagtctttttttggtagatagcgaccataccggcaattttctggcacagtttctctcttgtaggcttattgaataattacttcaaatagcggaagtgcgaatacccaaagttaaacatgctacgttttgctcattgaaaa

SEQ ID NO: 52765 - DNA, 357 bp, Mus musculus
  source 1..357: mol_type = other DNA
atctgctctctggaacacctaggtgtcgccacattgaggaccatcaatttctcgtgatacgctgtgaacacaaagcgcagagcttaggaaccagggagtgccaggctcctgttcctcaccgtgttctagaaaagcagtggaactggagcgcgtggccagactggggcaccgcacaggggcgcggggtcacgcggaccagcgtgtcccatctccttcctggggagtgggacccgcaccgccctagctgatggccacacctcggtgctgtgcttagccactacgaggggcaggaccccgtgcgcaccaccccctcagcatctccgtggggcggtgctgaggcaggagcaggctgagccc

SEQ ID NO: 52766 - DNA, 464 bp, Mus musculus
  source 1..464: mol_type = other DNA
tcagagcgctgggggctctgagcctggctatgcagatggtcactccgataccctgtgcatctggacatgtgagttccaggacagccagggctatacagggaaaccctgtctcggaaaaaaaaaaagtttctctacagtgagacattttctaacaggtggtttgaatggattggtcccattttctcacctcctctgagaggtgtcagtaggagggcccatagctgtgggctccctgagagtcttttgctcctgtgaatacacagtaacaagttcttggacagtgatagtaaaactagcaactccgagctgctcgccaactcggtgtagggcagctgctgttcacgaagccctggcacctctgagaacccgaagtgctgcggttacgcgtgtccccagcaacttcctcctgtcccccgggaactcgctggccagccgcccagccctgggtcgggctttggagactc

SEQ ID NO: 52767 - DNA, 292 bp, Mus musculus
  source 1..292: mol_type = other DNA
gctttaaccttatcttaaatattatgaaagtgccatctttaggttaacttaggaaaaaaaaaaaaacgacccgtcaaggtttttacataatgagaattcacactccagaataattttatgttaaactctagtcatagctagagctccaaacaagttttgagtttaaacagtttacaaaacccagagacggtcctgcggtttggctcagtatgcgtgctcgcaggaagagtaatagccacctggccaggacgggctggaaagggcggggcggggctcgaggcgcgcctacttg

SEQ ID NO: 52768 - DNA, 425 bp, Mus musculus
  source 1..425: mol_type = other DNA
cctcctctgagaggtgtcagtaggcccatagctgtgggctccctgagagtcttttgctcctgtgaatacacagtaacaagttcttggacagtgatagtaaaactagcaactccgagctgctcgccaactcggtgtagggcagctgctgttcacgaagccctggcacctctgagaacccgaagtgctgcggttacgcgtgtccccagcaacttcctcctgtcccccgggaactcgctggccagccgcccagccctgggtcgggctttggagactccagactgacattgatgatgtcaccaaacatcaccaaatcctggggttttgggccctcggtaccgtttgcgcacgaaggggcgtggccccgggacccaggccagggagccagaactattcgctgctcgcaggagcgcagcctgtcgccaagc

SEQ ID NO: 52769 - DNA, 199 bp, Mus musculus
  source 1..199: mol_type = other DNA
tgtcattgggtgagacccttgccggatgagcctcccatgggctgggcgggggacagcctcccaggatgttccaacattgttggtcccagctctcgtgggagcgtttgtaactcacccgacgacccgacgcccagggttccagctgtcaggaccaagagcggggcttgggaaccgcccgctacgagcggggtcaagtccc

SEQ ID NO: 52770 - DNA, 342 bp, Mus musculus
  source 1..342: mol_type = other DNA
aacatagcccgagccaatttggctctggtgttgcaacaacccagctcagatcagctagttctgaccacatacctgtcagtgagcagtcagttaactacttggtaagtagtcgctcagtgattaagagcactgactgctctaccacatggtggctcacaataagatttgatgccctcttctgaggtagctacagtgtacttatatataataaataaaaaaatcttaaaaaacaagtggtctctagtcctgaatgaaaaatggttcttttctatagagcttttggcgtccctccccctctccggacccgagggcgtggccggccgcctagagggcacgtcgacg

SEQ ID NO: 52771 - DNA, 374 bp, Mus musculus
  source 1..374: mol_type = other DNA
tgaaattttgaaacatatcataaaacccattgtttatgacaatagagacagacataaaagagaagacaaagaattaactgaggaagtatgactgttctttctctttttaaaagtgtgtgcgtgacacgggcagagaactattattgttagatgtagaaacatgaaactaagtaggatcttatgtttgttttcatttgtttagacatgtgagcctcttagaagacgctgctcatcttccggatccaggtctatagaaaaaaaaaaaaaattaaggaaataattttgagtttgagtgatgttaaatttaggcctggtctaaatagacctgctgtgatgacttcatcaatggtttcgtcctctgatgagatcatagt

SEQ ID NO: 52772 - DNA, 355 bp, Mus musculus
  source 1..355: mol_type = other DNA
tctagctagccatcttgggtgctagattcggtgtctacctctagtgagctcagtatctgatcaaatatccttgcttatcagaatataccaatccataggctaggaatgttatcattgacgcaggttcacgtgtaagtaactgcatccagagtgggacgtgcctttcagggaaacctcaatccttgttcctggatcaagatcgcgcatgcagctttgtccccaagcgttttgggggcagcaccacatggctgcgcactcgcgctcgtccctgcggcagcgcggcgctgggtaccactcgcgccgcagtcccggccacgtgacggaggaggcggtagagcgggcgccccgcccccac

SEQ ID NO: 52773 - DNA, 438 bp, Mus musculus
  source 1..438: mol_type = other DNA
gctggcctggagctgcctttccagcctgccttgcaatcggagtgctgggaatacaggcttggtcacttttgatggtctagatcaatacggaccatcccgtgttatgtttgtttgcaagctaaaagcttgaagcagcgcttcccgggtcggggtggcgatcgcgtcaactcaagtagagactctggggaccgactccccgcggagcagcttgagcgcccgccgggatagcgaggccaccgcgtcgcgatcgtccggggtccttcgggtccttcgggtcctgcaggcgtccagcgcgctgcctgcgcgcagggcagaacgaggctggagcgcgcggcgggtagcgctccccggggggcgtgaggacgtggggaccgcgcgcgcgggatccgcgaggacgaggaggcggagcggtggacggcgtcgatcaggcggctcaca

SEQ ID NO: 52774 - DNA, 449 bp, Mus musculus
  source 1..449: mol_type = other DNA
taaaaccatctatgattgatggacattttaaaaatgtactacagataattgtcttgtctggttaactaggctcactgtcctcactgaatgtctgagtagagagagtgccaacactcaaaaaaacatatctaaaaaaattaatttggcaggctcagagggacctgcgctcgcaggccaaagctggaagcgcatcgccccagattgaattcaagttcttttcgcgaccaggggcagggtccgggcgcataactgcagaacccacagctcggtccccagccgtgcggtcgcccctcaccgcctgtcactcacctaagggggtgacgcccccagaccctgggccgcctgtcagtcacctcgggggtgacgcctccaggccccgctgggccgtgcggcccccaagacggggcggggcgaggcgagacggggcggggcgagcggacgccatcgcc

SEQ ID NO: 52775 - DNA, 656 bp, Mus musculus
  source 1..656: mol_type = other DNA
acaaagagcgagttatttcagctttctcgcttattctatttccttgcccgtgcgaaggaaaaacgagaccgttgctagagactctggccaaccagcttacagccggcagtcggcgccgggaccgcctccggttcacagcggctccctcgcgaccgaagcttgccggcccgcccgcccgcccgcgcccgctccgcagctccggttgcggggaccggtccgcccgaggtcctcaccttgctcagctgctggtggatgagctgcttcagctccgaggctctccggaggcagcgacatgccggcgctggcgcctcgcggccgctagtcgcccacctcacacggtgcagcggcggagcccgtcgtcccgggcgcgcagcatcagcggcgggcggagcacaaagcgccgcggccgcgtcagacctggcagggcgggaatccggcagccgcggcgccccaacgggactgacagacgccggggctggcctgtgagccgcctgatcgacgccgtccaccgctccgcctcctcgtcctcgcggatcccgcgcgcgcggtccccacgtcctcacgccccccggggagcgctacccgccgcgcgctccagcctcgttctgccctgcgcgcaggcagcgcgctggacgcctgcaggacccgaaggaccc

SEQ ID NO: 52776 - DNA, 418 bp, Mus musculus
  source 1..418: mol_type = other DNA
gggttggtctttgagaccttttcaaaataaaccaaccaaaacacagggcttcactgaattcccaattccagaaccgagttaaactgtggatcaaatttcgaatccaatactgcctctgagcattttctcacatctcttaagattatcagatggtaagatttttttaagcacatgagccaaacgatttccggaaccaggcgcttgtttcgtagagacaagcgatttgtttggcacaaaacttgttgagattgacatcaccctaaggtatttaaacttgaaccagggcaacctagctccagggtggcgcccggccccgcccccccacctgggcagtctacgacgtccgacccacgcggcgcccaggcagcgcgctgacgccccaaggccggcttggctcaacgtgggggggcggggcggg

SEQ ID NO: 52777 - DNA, 326 bp, Mus musculus
  source 1..326: mol_type = other DNA
aataggaataaaatctcagaaaggattacttttatttatgtctatgtttcagattctctggatttattaatttactggtaagatcatttcactatgtagagaccctttaaagtctgccttttaaaacgattcccattctttaaacatgcatgtttcacctatatatatgtctgtgcaccaatttgatctcgtgggagttagacagacaacctctctctcacaggctattcaagtaaatattggataccccaggtgactttctagaaagtcttttcgctgagcgggactccctaagccagttacgcggttgaaccacccactcaaat

SEQ ID NO: 52778 - DNA, 325 bp, Mus musculus
  source 1..325: mol_type = other DNA
aaactagaccaggctggcctcgaactcagccccaagcgctgggattaaaggcgtgtgcgctaagtgtttttaaatagacattcaaaagctgttgaaggtaagacagactcgatacatttttcagataaaatttgtgcggcaggcggatttctgagttcgaggccagcctggtctacagagtgagttccaggacagccctgtctcgagttcatgaatcccggaacccgagcctagcccaatcccgggcgggctcagaggccacgccctcgcttcctactggagggagagctcgcgggcctccggggcgcgcgcacgcgcactgccg

SEQ ID NO: 52779 - DNA, 416 bp, Mus musculus
  source 1..416: mol_type = other DNA
tggtaagatcatttcactatgtagagaccctttaaagtctgccttttaaaacgattcccattctttaaacatgcatgtttcacctatatatatgtctgtgcaccaatttgatctcgtgggagttagacagacaacctctctctcacaggctattcaagtaaatattggataccccaggtgactttctagaaagtcttttcgctgagcgggactccctaagccagttacgcggttgaaccacccactcaaatccagcttcgtctgctgctgcagcgaggtccggacgcaggctccgcccgcgcagggcgtgtccctcggggcgtggcgcgccggggccgacgcgggcgggcaggcgagggccgacgtgccgtacgtgcctccgcggtggtccgggggctgcgggccgcaccgccgcc

SEQ ID NO: 52780 - DNA, 527 bp, Mus musculus
  source 1..527: mol_type = other DNA
gttaaaccaaacctgaaacttgggttcatgtactcaactctctaattgtgttggctgcaacaaagggtcatagctccaggagaaaggatctactccactgtctgcctgagaacagaggatcaattctgctgcaggcaggcattcacgcgcttcgccccagttagctctttacagggctcagggtaccgggtgctctctcctcctgggagccccggacccgcagcctgggggtggggtgtgtgcacctgggcggggccgcatcccccggcggcgccccccgcccccgccgtctggccgcacgccgggtcctcgccgcagagccgggggaggagcggccgaggctgagttgagacagacccggcctctgcgcggtggcgggactcggggccccagcccgacagcaccggcgctctccctccctccttcccgtcagccggaggggatccccagctagccggggaggagctgcggccgccgccagacaggctgcaagtcgggcggggagctccgagagcccggtggcaggt

SEQ ID NO: 52781 - DNA, 415 bp, Mus musculus
  source 1..415: mol_type = other DNA
cctagtcatttctgtctgtcactttgcatgcctagaaaggttagcttatggttgaagagtttgaagccatctcctcttatgttattccgggagagctaatcctgaaactctcagaatttctgcttgaccagaactgataatttcttggaatatgtatagtctcattttcataaagatacaaattcagattgttacctctttatttatttttttgtgatgataatacaccaagtgagctatcatagtaatgaatcaactagttggtacagtttaagaaaggccagcctagtctagttctccaggacagccagggctatacagagaaattaaattaaataaaaaagaaatttgaattcatcactgctgtttatttatcatcaaatctttgcttctaggatagtaggactaagaaatg

SEQ ID NO: 52782 - DNA, 261 bp, Mus musculus
  source 1..261: mol_type = other DNA
gtagcgatggtcaggcatgatctcacgttttgcccaacctttgggtcagggtcctacggcagtgccccagagaaagaagcacaggatcttgtcctccctgggctactgtggtcggagccacgcgtgtacgtcacttccggggagtgcgcccgggacttagtcaattccaaggccagactgggagcgtggcttcctccgcgttggaactacgagtcccatggttccccgcgcggcggcgtgcctctagccctgcgagcgggc

SEQ ID NO: 52783 - DNA, 155 bp, Mus musculus
  source 1..155: mol_type = other DNA
cacagatcaaccccaccatgcctggggtgggggtggaggtgggactccattgcagtacagaggatctggatcaagtcattgaactgggcactgtgcgcaccgttgcaacaacctagtggtggaccactaggtggcactgcacacacaactcctag

SEQ ID NO: 52784 - DNA, 524 bp, Mus musculus
  source 1..524: mol_type = other DNA
gtggattagcaaaaattattttcaaagcggctttggacggcccaaatttgctttagaataaactatcccaatccacaggtagattctacgttctgaccctttggggtgacactctgcagatggacccagggcaggggtgacgtctttcgactgtccccgggcagtggagtgctgacgactcccgccgtcaaggagggaggccgcgatgggtcgtcagcggcgcgctccgctgccgtcagacacacgcccgcggtgaaggtgccggctacctctcaggatgtggggacgtctccacggattcccgccgcacgggccgtgaggaactgcctcggcagggccacccggccgagcggaggacgagcacgtgctccgaccctccgtgcccgctcgcagggctagaggcacgccgccgcgcggggaaccatgggactcgtagttccaacgcggaggaagccacgctcccagtctggccttggaattgactaagtcccgggcgcactccccggaagtgacgtacacgcgtg

SEQ ID NO: 52785 - DNA, 441 bp, Mus musculus
  source 1..441: mol_type = other DNA
gctacatatgccgttggagccatgggccattaattgtggttcatccttcttaaggaagtatcttatttcttaattaaagtatgacaataaaatctattacttctctgtctaactgaaactttcttctctactaatgaatttattaatttttctgtttgtctttattatagcttattcaattataaagtctattaaattactatgaactctactcaggaattacagcagaatttactaattgaactaaggttgaaattaagatcgttttcttcacctttttacccggttaaccttttaaaacaggataattttttgccaaaagaccagggatgtggaaagaagaggcctccttctctgcactcccaggaggagagagaggttcttgctgttcatgcattgagcaaccctgtttactggattcctatgcactcggaggactgg

SEQ ID NO: 52786 - DNA, 171 bp, Mus musculus
  source 1..171: mol_type = other DNA
ccccttaagtttctgatgttagatatctagtggctaagagcttcactgagcagctgtggtgcttgtcaggctcccagctgtgagagagctctggcaggctgtcagccatccaccatcagcagcacaccaaacacttacatgtcttgccaaatcagttctgataaaaaatat

SEQ ID NO: 52787 - DNA, 420 bp, Mus musculus
  source 1..420: mol_type = other DNA
taatgaatggtactctaccttcaaggccacatcaatatggcctagagttatctacaattgcaaattatgcgtatcatataggtatctcaaagtcccattgctattctggtttttggttcaagagccatacgagtcttacgagagggagaggggagggaccctcctactcttccagctcagggacactgctgcattgaggccctcacggcatcttccgggcctcccggcgaggtctttcacgctgcggggaacggggcgccaagcgcgctccgagagccacgacctgagtgagtcccacccgccggcgggaccgccctggttcccggaggaggcgtggcctagagcgccgccatcttggcggcctctctagccagtcattgtctggtggagcagccgcggccgcagcgccttctctttata

SEQ ID NO: 52788 - DNA, 508 bp, Mus musculus
  source 1..508: mol_type = other DNA
cctcgtcccctcccctcccgggagaagagagttggctgcggatcggcggcggcggcggcggcggcggcggcggcagcggcggtggggaagccgaagcgggcgcgggcgccggcgatagacatgaccgccgcctgggcgccggcgctgcaccgggagcccctcgtcgcgcgcgggcggtaggtagcggcgcggcggggccggctgggcggatgcgcggcggggcccggccgggccgggctgggcgatcgcgctcgggctcggggccccgtggtccccgctgtccccgccgaggttcgggagctcgggagcgacggcgtcccctcccccggcctccgccccctccgggcccggcgggctcccgggcacagcgcactttgccaatgggcctgacttcaaaaattttttttacaaccctttctttcacaaattaggggtaggaccctgaggctcttcttccagagacgctggttagtttgatcgtctctttggaaatacaatatcgctattt

SEQ ID NO: 52789 - DNA, 490 bp, Mus musculus
  source 1..490: mol_type = other DNA
ccctgacactccagactgcagagtgtagtgtgtgtggctagccttaaggaagggacgcctggcttcatggcatttagctagctcgcttttgtccacgcagccggctgcggcgtggcgaggtgaagttcaccggcggcggccacccctctgccccgggtctgagagcctggggctggcagagccctgggccggccttttgtaggttgttgaccaagcagccagaaaacactgccccctctctctgtttgagcgaggtcagagacgtttctcaggcagctgcgtacaatgctgggagctagccagcagctgccactcgctttttaatcaaattaaaacaaaaaagaaagagattctgctcaataatgaccctgttccacttttacccgcagcgatctcgagtgctcggctgcggcgctgcacaggccgggccgccatccagcctgcggtctgacagcagcgccggggcctcccccgcccgccaggaatggtc

SEQ ID NO: 52790 - DNA, 483 bp, Mus musculus
  source 1..483: mol_type = other DNA
acacacacacacacacatatatagttttggcttggtatctttgctagactctgagttttagaagtttcataatctatacagaaagcaaacattgccatattccagtcatgtgtaatatgtgagcatgtatattattatttaatgattacttacttttcatattgttagaacccatgtagaagtatacattttcatctgcatcttttacaagatgagtttacataattgtctaagtccacccatctccttagcattactcctattcatgggatgcatcttcctgagtgattcacctgggagctcgcaccagaaagtcactatctgctattgaatgactggctttatttctaaaccatatggaagaaaaaaggagactttaattaggtttgaatccagcactgtaataaaacttataacactgaatatgtgagaaatagtataggatgcatggtttcatggcatattgtatagttcaacatatct

SEQ ID NO: 52791 - DNA, 287 bp, Mus musculus
  source 1..287: mol_type = other DNA
taatgtctgcatgcctcaggaagcaggcttcaaccttcctgcctatctggtatccgcataactctaactaatgccaggtagtatttgctcaaaaacttgtgacgtctccaaatggagattgttaatttcgttaaatttcagataatccccaaataaaatgttttattaaatacacacatacatactgaggagaaatgaatttccaggcagtggagagccagaggctcctccccgaggtcggggacactggactctggcctgggcgcgccccgcctacaggtaaggac

SEQ ID NO: 52792 - DNA, 432 bp, Mus musculus
  source 1..432: mol_type = other DNA
gaatctcaagctgcagcctaggttgacaaaaaaagagtcacattttaaactctgaaccgtcaggtcaggaatgagttaagcaattaaaatttaagacagcaacaggtttggaactattttctttgcgaaggaatacatcaaatctgactgtatgtattcagtcgtctgtaaatttagggatgttgcagcatgttgaaaagaaaatccaaagtgttaagcgtaggacttgccatatactgtgtttagcagaaactcattgatcctgaattggcttttagccagtaaggattccattggactgattcttaagcctgcgccctaactttagaaatgcagcttccttctgataggtggaggcgctgtgtataagagctggcagggcatgcactgccagactggctcgcccagccgcctaggcggactccagccagg

SEQ ID NO: 52793 - DNA, 489 bp, Mus musculus
  source 1..489: mol_type = other DNA
aaaacatgtcttttaaaaaatgaaataaaataacagatgagtcatcttccaaaggttactttacaaagtaaaccgaatagattctttttgcaataaaggaagattacgtttttgtccccttccaaagtttttcttttgtatttttttaaacagaataggctaggcttgagttattagaacctcagagtatttacaaatggttaaagaaatttttgtattgtttcctttacgagttaaatgtgggttaaaaaaaacacgaaataaatgcatttcaataaacacggtgtccatgcaaactggtttcgtttattctcaacagcatagactgtatgacgttgctgctgcttagccacagcaacagtggaaggaggtttaaggacttccttaaaacctctcaatggcagcccctggcagacacagcagttgtggaatcttctagcggaccgcccagacactgtctgctggagcgtttctcaccctgtcagaagg

SEQ ID NO: 52794 - DNA, 390 bp, Mus musculus
  source 1..390: mol_type = other DNA
tgctaacaactatcaacaaaatttaattgtttgtgatacataatttaagtaaataccatatatgaattaaataagcggagcctaccgctgctctctggttagcctgccaaggcaacgggtctggaacaccggttatggcaggccttgggctgcagagactgggagggtggcagcgtccctttgcgtgcggacacagacatggccttgggtgaggaccttcatccctccgcacccggggccgcaggggatgctgagcttcctggggcccctcgagtcaccgccgtctccctcctgctgcgggaaggatgctgcgctccccgcagaggactccgggcggcggacagccccccggagcgcgtcaccgccttcctccgccaccgcaggaaggcc

SEQ ID NO: 52795 - DNA, 569 bp, Mus musculus
  source 1..569: mol_type = other DNA
ttccccctgtgaaacatggaaaagtctttcctgtcccaaaagagtaagcagatgacatcagcttcatgtcaccctatgtttatagagttgaaagctatctctaatgcttacctttagctaaaatcacgttattttccttgaacaagtgaacacagtcactgattgagtaacacaattgatggtctctatcatctaaatttatcttttctaaggataaaatataattatgtttatggttcattagccaaagttttttcagttacatttgctcaaaactttagaagtgtgtttgacattagtaactcatttacattttctttagctattacaagacttggaaagtatttagttctgcctaattttgtgcacaaacctagaggaaactttatttcaagtgtgtgaccactgtgaacaaactgttccatgacaagcaatccgtgttactaatgtaagcttgttcctatgttaaaaatggagacagttgtatttactgtgaagcttaaatttatcttaatccctaggtataggattcctcaatatgaataataagcctttcatatataagagaa

SEQ ID NO: 52796 - DNA, 285 bp, Mus musculus
  source 1..285: mol_type = other DNA
cactattacctgatgatgtaacattgcatgaactagaatgcatgtattcagatgaaaagcaagggtgtcttcagaaaaacagaccattgttgagatagcatcttttttgaaaattgcacttggttcaacctggtagacaggtacttttccccccctgggaatcaagggtcccaaagaatctgcagggcccggcatctgagggcgcctcagcccagcctgcccattgcgccgggaagaacggatagagtctagaccccctcccggaggacggcgagtactacacat

SEQ ID NO: 52797 - DNA, 416 bp, Mus musculus
  source 1..416: mol_type = other DNA
acataatttaagtaaataccatatatgaattaaataagcggagcctaccgctgctctctggttagcctgccaaggcaacgggtctggaacaccggttatggcaggccttgggctgcagagactgggagggtggcagcgtccctttgcgtgcggacacagacatggccttgggtgaggaccttcatccctccgcacccggggccgcaggggatgctgagcttcctggggcccctcgagtcaccgccgtctccctcctgctgcgggaaggatgctgcgctccccgcagaggactccgggcggcggacagccccccggagcgcgtcaccgccttcctccgccaccgcaggaaggccggacgcccgcgctcgctttcccgacccaacatggcgccgggccgcagggcgcatgtgtagtac

SEQ ID NO: 52798 - DNA, 279 bp, Mus musculus
  source 1..279: mol_type = other DNA
tgccggggcctagcaaccctataggtggatcaacattatggaatgtaaatgagctaagaaaaaaaaaaaagaaagtatatcatgtttaatctgtaatatttactacatctatagaagacttagaaacattctcaagctaagttagattattccactagtatcctaatcctagtgcagtggtaattaatctctagatatgtttacatttataagccaatccatagtgtttgtatagacattagattacagtatatttggaatctccaaactgcactaggt

SEQ ID NO: 52799 - DNA, 320 bp, Mus musculus
  source 1..320: mol_type = other DNA
ggatgcagtgagctcctaacgtgctaggtgcttcatagacattaaaatatgaaactgtctgcaaaatcagagtctggaatggtgattttattttttttttttacataaaccaattttctctaaatcattggaaagaaaatatatttaaaaagtgatttttttttctaacatgcaaaccccagttaattccagttaactccagttcctgggggggcgcttgcattcacacaggaggcatctggctgggttcttcccttcagtgcgcaggcgccaggctggaggctaggccgtggtttccaccgtgcagcagctgcggtgcg

SEQ ID NO: 52800 - DNA, 536 bp, Mus musculus
  source 1..536: mol_type = other DNA
agtgactaatagttaccagtcaataactaacatagcagctagctggctaatgaataaaacataactttctaaaattctaatcaatttccttaagtaatgttccattatcctttaaaattactcctgaataacataaatacttatttaccaggccaaaggaggtttatatcaagagcccctgaaatgtgaattccatatgaattcagggatttccaaacccttatgactgccctttaaaagtggtaagagaattggtcagtggccagaggatactgacaacagtttcaaggggatactgttatcattcttcaagacagctgagtttgaaaatacaaaatgagatgttttgtttgctccttagttgagaagcaaacataggtaatagccgacgcttgggactccaccggtctagccttcagcgctctgcctgcccagtgggggttgggccggcggagacaatatggcctcgcccctagcttggaggacctaagaggcgcggccggggccacgccccgggcgggagggccgctctgtgc

SEQ ID NO: 52801 - DNA, 271 bp, Mus musculus
  source 1..271: mol_type = other DNA
tgtgtttacacacacagtctgtctgtctgtctgtctgtctgtctgtctgtccagggactgaaaaacctcaacccttggggatggggacttctgattcacttctgggagatcctaaacgaaatgtcttttttttttttaaccatgcacaagaaagaaagtaaaaggataatttcctgaatgctgaagatcaaaaatgattgctcgctttgcccacagagggcatccctgcgcagctgctggaagcctcctcctctccggatcaatggatagt

SEQ ID NO: 52802 - DNA, 477 bp, Mus musculus
  source 1..477: mol_type = other DNA
aactttagggctccattgttgctataaagccccgaggacttaaaattagtttggccggccgggcgtgggcggccaaccggagggacggagccacgcggctcaggaaaccacccccgcgagtggctaggctggcactccggctccgcctccgcctccgccggttcgccagcctgaaaggcagtgtcgcttccgcacaccgcccagcggcccgtgcttgcagccccaaagcccggagtccgcgccggaggcgcacgcgcctgcgcagacatccgctccgcccccgttccccgggcgcccggctacgcgtgtaaatggaacaatctagttgctcccctcgagagcacgccccgcaagaggagggcaaggagccggcttcgaagactggctcgttctcgtcatcctcagcgcgccggcttcattcggagagcggcgtggggcgtcgccgccgccgccgcgcgcgccgggggctggttaagg

SEQ ID NO: 52803 - DNA, 459 bp, Mus musculus
  source 1..459: mol_type = other DNA
agaggttttaaaaagccctgtttacctggagtaaacttaatttttaaagttggttttcaggtaattcattttagaattagtttctgataacttaaggtcacttacttagaaataaagtaacggaagagggagttattttaagtaccttgaataattttttaacaatcgttgaattttgccagatttagttgagactttgaacgttttaagaatcaggttcaggactttctgctgacacaatcttaactgaatgtacagaaatctattataaattccacaaagcaattagatttcacataggctattcagagaagtaaacttctccctactgtagactcaaatgattgctttaatatttcttaaaatacgcttctccggagctgcctggttacaaacatgcttaaaacaaatcctttccaaagagaattgacataaaggtttttagttttttgtcactgt

SEQ ID NO: 52804 - DNA, 289 bp, Mus musculus
  source 1..289: mol_type = other DNA
catgcatgggctgtgatttaaagccagggactattagctactaagtacaatattcataaaattatacaagaagggccttttgccaccaaatgcaccacttttgtggtttagcaggtgtagtcttgaaggtgcatcctgcgaaaaggcgactcccctccggcgccgttgctcgctcgctgctcaaactcagccagagccgccgggctgcccgcgggcgcctgcgcactgggaccctccctgctctgggcgggaggcgggggcagcggggccctgaaattacccggatgtg

SEQ ID NO: 52805 - DNA, 382 bp, Mus musculus
  source 1..382: mol_type = other DNA
tgtactacataacatcaggccagtactgacacaagctggtgagagctaagagtgcccaccgaggggctcagttcttgaccatgtgtggacatagattagtgaactcttgagagagctgtctctcaaggctcgtttcattagtaaagaaacctattaatttaagttcttgtgttaattatataatactgagggtcatggtggtgaacacctttcaccctacctgagagtcagaggcgggtgaatctccgagtttgaggccaagttccaggatattcatgaaatactggatataaagaaaaaaaaatgactccctgattaattcttctctctgggacttcaactacagtgtttttaagcccagggccttgtacatgccaggcga

SEQ ID NO: 52806 - DNA, 429 bp, Mus musculus
  source 1..429: mol_type = other DNA
gaaaggaaataatcagctctcatcatgtcttcccagggcattgataaatctaagagatttctatctttggtgccagtggcttcatttctgttgctgtgataaaagtttagcccggaggcagaggctgactcttctcaaggcacaaacttacactttcaggctttgcagttgaaagattcatccctcttcggaaggtcccaaccacatggtactcatatagataaaataagtcaaattaaatattaattaaataattaaaagaaaaaaagaaattaagtcagagccccagcagccggaggagtggatacgaacctgcgaccctctcctccccgcagccagcccgggcgagcgggcgccaccgagcacggacctcccgcgcacctcccgcgctcctagagcggccgcgccggaccgcggggcggcgcactt

SEQ ID NO: 52807 - DNA, 373 bp, Mus musculus
  source 1..373: mol_type = other DNA
tctattccttaagtgtaaatagattccggtttctgaaacaaaaataaatattctgcacagtaactgggccagcacacgacgccgacccagcgccgcgcctgcgcacaacgtcttctcgcgtgaacgccctgcggacctggccggtgatcgggataagccaccctgcgctatcccatggagccgaccctgctcccccgaagcacgtccgtcctcccgccgtcggggtcgcacgtgagctgatgggtgccgccgagaggaaccgagccgagggcggaaccaggcctgagccacgccccgcgccagctccgagcctcccattggcccgcgtgcctgtcggtcagcccggcaccggcccgcgcctctacctctgcgc

SEQ ID NO: 52808 - DNA, 304 bp, Mus musculus
  source 1..304: mol_type = other DNA
ctgtctcagtaagagggcgtgtgcccaaccatgtgaaattgaaattttaaatgtgaaattgaaatcaatcaatcaatcagtgtaatttcataatttaaaaacaaaagggctgcgttaagcgctgttcactgccctgaacgtaccattagctaactttgagcttctgggtgcccttcatgtcatacaggcagagagcctctgctgttggcattgtcggggacccacagaaaagcagagcagctggcagccagctcaggcagcctgtgtactgtatctccagcaactagcaggggcagagtctaca

SEQ ID NO: 52809 - DNA, 387 bp, Mus musculus
  source 1..387: mol_type = other DNA
ccagaaacgagggccgcagcgtcggtgggccacgttcctttcttactaaggacacttacataggacctcccatgaattcaggcagctggccagccatgcatcatgcatgaaggagaactggggcaagggttctgccttcaccactttcctctgggctcagcatttcctgaaataacaccgagtcgagtttctggttgtacactgcacactcaaacaggaagcacttcctgtcagtgctgaactaaagagaacggaaagtgttttttttttttttcccttcagtaacagcaggagaaagaatgacaaaaatagagctattaaataattaagtaattacagtgtgctatattttcttttaaggacagcatgttatctgcatgtcagtaa

SEQ ID NO: 52810 - DNA, 611 bp, Mus musculus
  source 1..611: mol_type = other DNA
caaataatttcagtagttactgagtatctatgaagtatcatggcacattagacttggttaagtgtacaagtgcagcccccactggagagcagctttccgttttaaagggatgcatctacctgctggaagagagctcaaacaccagtcactagcaaagtttggggtccgcgaaccaggacgtacgcgcagcctagatctgctgcacgcgcaaggccccctagtgacctgagctcccgtagcgtccgaccctcagccaggggtggctcccgcccgtttgggtagaagaggacccgaagcaaagactaagctccggccggggctcagggagagctccttcctcaaggaccgggctttgagggaacctccaacgcttgcaggagtgaggccccgctggcccagcgggaagcccaggttgccccgggaccggacgtccacgcaggaggtgcagaaacccggctgctcaggagaggtcgcctccgggtctgggtcccagctggatggtccccggtgcggttgctggggctccagctgtccccgccgcagcaggtgggggcccgcgggccagggcaggggcggggctgggggcggagcctcggcgggggcagtgcggg

SEQ ID NO: 52811 - DNA, 398 bp, Mus musculus
  source 1..398: mol_type = other DNA
ttctgttgtaaacaggtgtctgagtccagctgtctcaaggacaacttctccatctgctggcagggttaaactagttcaagttcccaggcctagttcttttttttttaaattatctgttaacctacataaataatatataaatttctgttatctaaaccaacttatcattcggagtcccaaatataatgtctaagagaatgaattaaggaccctgaagccaggtgccgctcagaaaataaagctttcattttaagcatttgcaataaaggcagaacctttaagctcaccaaagaaaaaaaaatgctctgagtgtctgagctcataatttgtacacctgatgattctgcagcaggttcgagagcgctgtggtcacaggcccaggccctagcggagtctgc

SEQ ID NO: 52812 - DNA, 359 bp, Mus musculus
  source 1..359: mol_type = other DNA
tagaccaggctggccttaggccaccactgcccggtagtactgttgtccaagctggacttgaactccaggcagaccttgtccccagcagtgatggtattaccagcacgtgccaccatgactaagaagttaattttttttttaaaatcagatgtgaggacactcccattgataagcatcatttcttgtctgtatggccacgcccttcggaagccgcgatccggaagccggagtccgcctgatgacgctcagcggctgacgacgtctgcgtcgcaacgtcgaagcaaatgcggccatattgccctctggcggccaccgtacggacttggaaggtggcggcgcactgtaggcgcggccatgct

SEQ ID NO: 52813 - DNA, 414 bp, Mus musculus
  source 1..414: mol_type = other DNA
cttgagcagtataactccatttaactgttactgggaactacagctctgatttccaaggggatcctgacactcaagaatggagtatctggacttctgattactctgttcaggccttaatctgcaaactaaagaaagctaatatgtcaacctcaaaggttgatcctgaaaattctttgcaaattgtaaaaaaaaaaaaaccaagcataaggttgccatgtggttattatcgccatcaagataaatttcgagatagtacaaaatgtagcctcaaaggtccactaacctttctcgtacttttaggtctgttacatgccatactagcaaaatacacatctatcttttggcccgcccaccttcactctagcagcacgaggaggggggcggggcggggtgacgcaccatggcaaccagcga

SEQ ID NO: 52814 - DNA, 398 bp, Mus musculus
  source 1..398: mol_type = other DNA
agagttcgaaccctcccaactaaagactgttccaagaacatttttcattgccaaataataggacatgtcgaggtcgtatgagctttgaccccagagctctggtctacctccttggttcccaagcaaggaacctggccagggaattcggagtgggccgagccggccaggccattcacgcccccttgtgtccggagtgcctgtgcaccgaggcgcgcagacgcacaggcaaccgagacccggcgggctgcgggtgttgtcagtgcgcaggcgctgaagatccccgggaatccgcgcgccgctgtgaagccgcagtgcgcaggcgcggagcctccccaatgagggcacgcgtgaccaggctgtacacacagcggctggtcctagtcggagccccaaaggca

SEQ ID NO: 52815 - DNA, 532 bp, Mus musculus
  source 1..532: mol_type = other DNA
ccaccttctgagaagtgaactattagtgttcccgctggagaacagcagtttccaaaatcaccttaatgacgaactatgctctacagagcttactctagagaccaggctggcctcgaactcacagatctctgccaattaggttttattaatggaaaaaacgttcaatacaaacccacctctgcccaggtgttctggcggcgcccggcggcaggtgcgacacccctcccgcacctgtgcggcgttcgccccgcggccagcagggggcggagcgcgccggctcccggggcgccgctcctcgccggccccgccccccgccccaggacccggtggcggcgggggcgcggagggcttaaaggcggcggcgaccgcccgcgggcaggcgcggggcgtccctccctcgccggccggccgcgtcacctctccgacctgagccgggagagcagcgcgccttctctccgccctcccgccactcctggtcgccgcaccagcgctgccgccgcccagggagtaaaggtcgcgcgggccggtgcga

SEQ ID NO: 52816 - DNA, 311 bp, Mus musculus
  source 1..311: mol_type = other DNA
ggcagaaatgcagcaaaacgcctatagttagaattatatgcagagcctatagctcaggtaataagagcactgactgctctacaaagaagacttcttccaaccttgggttctatacctgtgacacacacggggtgagaccttccggggacagcttgctgttgacaacagttgctagggtttcgggccacagcccctgtctgctgactctgccagctatgtggctgcattcatacctaggctgggcgtcccctgaggaggcttggcttagggagccccaggattccacaaggtgccctcgtgctgcagtggga

SEQ ID NO: 52817 - DNA, 338 bp, Mus musculus
  source 1..338: mol_type = other DNA
gctcagcccaggccacttggccgccccggggccccgagctcttatcgtgttctcagcacactccatcagcagctggaggcgtgggtaactcggggctgcctcggggacccaagcgctccctgcctccgacctagcacaggccgccgccagaaggctgcgcaggcgcaagggcagccaatcccccccacaccccacctccgctttttctgggatgtggggtggggtcctgtcctggaggcacacgtggcccgaagtgggggtaaccttggtcttcccgaggctcgggggaagggcaggggcgcggcctctcggggctccgcccacactcttaaggctgg

SEQ ID NO: 52818 - DNA, 298 bp, Mus musculus
  source 1..298: mol_type = other DNA
ggaggtgcgctggctccgccaccgccccagccggatttgtcatccgcttccactcactggggtggggtttgtgtaaccccccaaagcagacctctcatcttagagaaagatggaacgaacactaggtgttttttcctctctatccccaccctcagtcctgggtgcggagagaccatcccagcgctggctggctctcccatcttggagaagatgacctcccgtcttcccggatctcttctccagtgggtaccgtttcggaaaaatcagcagcccgtggtccgcgtatccatctggcgat

SEQ ID NO: 52819 - DNA, 332 bp, Mus musculus
  source 1..332: mol_type = other DNA
ttgttttgttttgtttttttgaacgacacaatgaacaacatgagtaatttcactcaaaaatttcgtttttacttttttagatttaagtaaaggaaaacaatcgaatcagcgttctgcggattaatttatggcactgaattttcatttaaataaataaatagttaaatgtaaaaattagattatttattttatgtgtatgccaggaactgctaaaacccatacattttaatttcggaattaaaaataaaaaataaaaaagaaagtcactccttttcaaactttctaaaccttgggctggaagtctcgcgagaggtcgaggtctcatgaattct

SEQ ID NO: 52820 - DNA, 500 bp, Mus musculus
  source 1..500: mol_type = other DNA
ccaggaactgctaaaacccatacattttaatttcggaattaaaaataaaaaataaaaaagaaagtcactccttttcaaactttctaaaccttgggctggaagtctcgcgagaggtcgaggtctcatgaattctcccagtgcggccagaggtgagtgctaactcggcgccgggctctcggggcgaatcctccgccgtggctccgggagcgctggggcgtcgccatcccggcagctgagctccaagggccatgggtcctcgccgcgggtggccgtgctctgcgtggaggggcgcgcgggcgcctccgacttggagccccggggcgtgcaggctgcggagctgacggggccaggccgccggcggagctgcggggggctcggaccggacggggacgcccgaggctcggcttgaggggtccgcactgctctgtgccgaccgcgtactgggcggttaccgctgcgatgatgtcatatcttaggacacctttggaactatcctctga

SEQ ID NO: 52821 - DNA, 554 bp, Mus musculus
  source 1..554: mol_type = other DNA
aggaatgtaatagctactaagagatcacattcatatggatctgctttttctgaatataaatttatttgaggaagtcaatgcaatctattaggataataagtaggtcaattactctcctgagatttttcagaatctgctaaatctactaattggaatcatagtataagaaaagccagcagcatgctgcagcttcaaatccataatgatgcctggatgtaaagtgggattttaattgtagaaggcatacaataaggaatgttgatccaataattacatgtggatccataaattatttggattttccagacagggtttctctgtgtcctagaactcaccaggctggcctcgaaaattctatctgaaatagagaatgatggtaagtcctagtataatagtgattactaaagcttgggccaggcaggccttactagtttttcagaatgagccagtcaggcgctttggaaatctgctagccaggaagggccggcccgggcgctgactacagcgcagctccggaagtgcggcgagccctgtgcacgtgctgttggcagccc

SEQ ID NO: 52822 - DNA, 375 bp, Mus musculus
  source 1..375: mol_type = other DNA
tggagtccattataggatccttctattctaatatttgtatagctcttagaaagtaagagtgatcgctgtttcatagggtttttttgaaacataaacacaatatcatatagcagtccacaatatgaacggttattaccataacggtcgacttcaaattctgtatttttctataagacaatatttcatgtagccaggctggcctcccttagatctgattcaaatatgcagcccatatttgacgctacacagtatatggtgagatctttctgttaaaaatattttattttttaattcgacaaggcccacaaaagacttgtatgacattggtgtgactcgcgtgctcggcgtgccacgggaccgcccgctgctggcgcg

SEQ ID NO: 52823 - DNA, 371 bp, Mus musculus
  source 1..371: mol_type = other DNA
attttagggaaatttaattttttttttttaagattacaaatattttagtgtttataataagagagaagacatttctccaagttttttgcctagcatccagacggtgctagattctgtaaagccagccaaattagttaactattgaattcaggcttagtctggcatatctatcttcaaaaaagaaaaaaaaagaacttttattgttttattgtcaacattttttttatattgtatatctttgcatcatgtgtatacctagtgcctgcaaactctgacccattattattattattattattattcattagtagtaaagaattgtcgagtctataaagcctttagctaaaagttcgtgaagacataatatcaag

SEQ ID NO: 52824 - DNA, 340 bp, Mus musculus
  source 1..340: mol_type = other DNA
catgcctcccatcccacagataggcattgtaaacacagcctgttgctaccagcaaaggttgtatgctcacaagatatgttggccacttcctcacccaggacacatgccctgggtaggtggctgagacacctacacaccaggctggcctcgaactcagaaatcatggcaaatgatcacctggggcagcagggccactccaggcagtggccaggacacatgctttgccaggccacagagaaggttcctttccgcaaggctgtcaggtgagcttaggtcatcaattgcttctaatctgggaagcacctgttgataggcattttatatggtgcaattacatacg

SEQ ID NO: 52825 - DNA, 319 bp, Mus musculus
  source 1..319: mol_type = other DNA
cttgtgtgccagactctgagcatccctcccactgtgggagcccaagtttatgtaaacccggtggcatacagatgctaatctctgttattatcatgaatcctgaggtctgagcctctggtcatgcattggaaaccactctttggcatggggttttacaaagaccggttatagctcatcctgtgtttgagtttaaaaacaaataggactgggaaatcttttcctgttgcaaagagaggaagggttccccttcacagaggaggcacccaggattctcgaagggtctcagcacctgcgaacagctaccactgtagctgaagat

SEQ ID NO: 52826 - DNA, 442 bp, Mus musculus
  source 1..442: mol_type = other DNA
gcatggcgccggcgggtgccggaggtcttccaggccgggaggaaacctgccggcggcgcgcgggcgagctgcacccctcctccctccaggatgctcgggagggagcgcggcggccgctgaggtcacattcgcgccgcctctccgccctcggccgcccggctcacacttcccagggcctccgtcctggccggtgtaaatgtctttgaaacagacagcgatcgcgcccgggcgagtcccgctgggtctccgccgacccccggggccgtctcggccgtgggtacccctctctagacctgggagagggtggaaatagcttttagaaacccgatctgttgtttgcgaaacacaatcgcttttttttttttttaaagcgacaggtgtctggccacgtgacgaggccggagccgggcgcgccactgcgcagtggaaccagccttgcggg

SEQ ID NO: 52827 - DNA, 548 bp, Mus musculus
  source 1..548: mol_type = other DNA
gtccctgagtgcggcgcggcgagcccccagcggcggcagaaggctccggtgcgagaggacacccgggcctcctgccgccactgtcgggtcggggccagcagctcatgagagcagccccggcggccacccgcggccaggagaaggagcaccggaggcccccacactagcctgtgccctcgggggcgagagcttgcgacccgccggagcccgccgccgcgccgccctcccccgcgctgacagccccccggggcgcagccgccgccgcagcatcttctgtccctgcttccccagcgcggaggaagtccccgccgaggacctgggcccccgggaacgcactgtggattaaaagaaatacgattttttttttttttttggcagaagaaaaggaaaggaagaacctccgaggtttttgagagaccctccagacatctcacgaggggtgaagtcaagtcttcggtagaagaaaaaaaataaatcgtgcctgccttttttttttaattgccccaaattaagttgcttagcaagggggaaagaggctttttcctccc

SEQ ID NO: 52828 - DNA, 710 bp, Mus musculus
  source 1..710: mol_type = other DNA
tcttcctttccttttcttctgccaaaaaaaaaaaaaaaatcgtatttcttttaatccacagtgcgttcccgggggcccaggtcctcggcggggacttcctccgcgctggggaagcagggacagaagatgctgcggcggcggctgcgccccggggggctgtcagcgcgggggagggcggcgcggcggcgggctccggcgggtcgcaagctctcgcccccgagggcacaggctagtgtgggggcctccggtgctccttctcctggccgcgggtggccgccggggctgctctcatgagctgctggccccgacccgacagtggcggcaggaggcccgggtgtcctctcgcaccggagccttctgccgccgctgggggctcgccgcgccgcactcagggactccggggccgagcgctcggcggcgtggcgccggctggctggctggctgcgtctcaggcagctctctccggcgcggcgagcggaccgagcgaggcgcccggctggctctgctggcgcagctcggggacaagatcctctgtgcgccgatcagcgagcgaatgtgcccagggctcgccgcctcccgcaaggctggttccactgcgcagtggcgcgcccggctccggcctcgtcacgtggccagacacctgtcgctttaaaaaaaaaaaaaagcgattgtgtttcgcaaacaacagatcgggtttctaaaagctattt

SEQ ID NO: 52829 - DNA, 290 bp, Mus musculus
  source 1..290: mol_type = other DNA
tctttcacaagactgtgaaaggccctcccacaagattgggctcctggagggcaaagactgagggccttacaggtccctaaattaatcactcaaagatgtgtgctttaaccaccgttttaaccaaaacagtggagacatggccaatggaaaattaattataacatcggtggcacttaatgccgcattaataacgccaagttctgtcccccaccgcggagggccccgctggcatcggcgtagcgggttcccagctctccagggcccgccatcctaggaaagaaaggcgaggg

SEQ ID NO: 52830 - DNA, 504 bp, Mus musculus
  source 1..504: mol_type = other DNA
cttcagcccgagaagattttggggggcctcacccaagtgtcggaaaacttgtcgagtagtttaatttccccgagcgaatgagccgagctctgcagctcggctgccccgggccggttgtaggtccagccgggccgcagagggcgtctggagaccggagaaaccgcggccgcctggcccgtcgcctcggccggggctgtccctttacggagcccccagcgctgggtggctctgccgggtcccctctccgcaccacccccgactcctgcttgccgcccgcccgcgcgggggtcctgggcgtcctcggcagcgccgcccactcgccagcccagccggagagaggcgaccgcacacatccgggccctttagccccctgcggcccccgagccgcgggcgcgggcgctaggcgcggggcgcggggctgccagccgcggcgcgggaggcggggcgtgcggagggcggaggcgcggccccgggagggaggagctgcccgctcgactgatgctc

SEQ ID NO: 52831 - DNA, 320 bp, Mus musculus
  source 1..320: mol_type = other DNA
cattctgcaaagggtgaaaaatgattattttgccaactggagggaaggaactgccttcactaaagagctgtcttgatggatcctctgggtaagagatggagcctccagctgcctggctggagttccaggcctggctctcccaggtgtgtctgatgctgcagggcagggagcagccaactgtggtcctcaggagctcctgacagcatcttccatctaaacaggagagagcaacctagggtgcagagctgcctccactcaggccgtccgcttccacactggaggcagaccggtccactctcacagagctgggcttgctgaca

SEQ ID NO: 52832 - DNA, 582 bp, Mus musculus
  source 1..582: mol_type = other DNA
gaggagagagcatgctccactctaaagtgcttcaagcactatgcactgctctgtagtgctagtgcctgaaagaggcattgcaaatttaggtttattatcctaggttgagtcaaaatcaacctggtcacaccactgcgagtagtctgaaatttctcacacttcacaatgagcattcgaagtgtggcggtacgaggccccgcccactcatttgcatagggcgcgcccctcagcggccaggacccaggctgcttcagagctctgccagcccaagcggctcagacccggctgggggcgggcccgggccggagcacgtgtccattccggcctcacgacggaggtgggcgagggcttagccgcggcgctccacccagaggcgccggggcgggggtctgcgggcgtggcacgccgcgcggccttccgcgatcctccacgagcccggtgggagcgcgccggacacgccggcctcgcctcgcctcacgctcgacggggaaggcggaactccaggcccccgacgcggtgctcacaccccgggctccccggtcgctgattggctgcgcgcgccgccggtcccggccggaggcg

SEQ ID NO: 52833 - DNA, 367 bp, Mus musculus
  source 1..367: mol_type = other DNA
cattatcatcaaattttataaatgaaagtggcaaaagtccagagagattaatctgttttgtagcagaaagtattgctctgggctgctttcccatgtgaccactgttctaaagtatttacatactggatagagtaggagagaatgattctttatgaataatgttaagatgttatcttgtaattttaaacatcttgacggtcttcacatcttcaggggtaaaaatctgaatacagacttttcacaggtttagaaatgtggggtggctcaattcttacagccacttagaaaaacacttacttcggtatgtaagaacattttaaaattatgcgatattctacaagggggcggggctgctccgtgatcgcgt

SEQ ID NO: 52834 - DNA, 633 bp, Mus musculus
  source 1..633: mol_type = other DNA
ctcacacttcacaatgagcattcgaagtgtggcggtacgaggccccgcccactcatttgcatagggcgcgcccctcagcggccaggacccaggctgcttcagagctctgccagcccaagcggctcagacccggctgggggcgggcccgggccggagcacgtgtccattccggcctcacgacggaggtgggcgagggcttagccgcggcgctccacccagaggcgccggggcgggggtctgcgggcgtggcacgccgcgcggccttccgcgatcctccacgagcccggtgggagcgcgccggacacgccggcctcgcctcgcctcacgctcgacggggaaggcggaactccaggcccccgacgcggtgctcacaccccgggctccccggtcgctgattggctgcgcgcgccgccggtcccggccggaggcgggagtcggcgccccgcgcctgcccgcgccccgctcggcccccggccctgcccgcggcgcccggcctcccgtcttccgtgcgcgcccgctcggccggcgtgcctcacgcctaacgggcggccgcgggcgccaatcagcgggcggcagggtgccagcccggggctgcgccggcgaatcggcggggtccgcggctcggggagggag

SEQ ID NO: 52835 - DNA, 280 bp, Mus musculus
  source 1..280: mol_type = other DNA
ttttcatgtgtattctcactgctgtgacaaattacatgacccaaaacaacttaaggttgattgatcttggcagagacatgaggctgctggtcatattcatcggtggtacatgaggcccacattaaggatgggtttatccttcccttggataaacactggaaggaagcacctgatttcaattccaaacatagtcaagttgacaatgaaaattaatcgtagaccaagaacttcctcaccccacgccgcccggacgctgggcgggacttccggcgcgtcacga

SEQ ID NO: 52836 - DNA, 452 bp, Mus musculus
  source 1..452: mol_type = other DNA
tcggtggtacatgaggcccacattaaggatgggtttatccttcccttggataaacactggaaggaagcacctgatttcaattccaaacatagtcaagttgacaatgaaaattaatcgtagaccaagaacttcctcaccccacgccgcccggacgctgggcgggacttccggcgcgtcacgactgcatccgggttggaaggcgtgctcggcggcgctcgggcctttccagaggacagcggggctcgcgcgcaaccggcagagggcttggggatggcggccgcgcccctgccggaggcggcatctcctgtgagcgggctgggggaacgcctgcgctctcctcgagaatggcgcttcacggcccgggcctccccgcgtccttgcggtgaccggccctctgcggcgtgcgcacgcgcagaactgttctcccagggggggctgggctatttccccgg

SEQ ID NO: 52837 - DNA, 323 bp, Mus musculus
  source 1..323: mol_type = other DNA
gtgtgtgtatgtatgcatgtgcatgggtgcacaagcatgcgtgcatgtgtaaatgagcatgtgtgttatgtatgtatatgtgtatatatagtaggtttacatatagctttatggctcaactatctagcttaggatagagaacctccccagtgtgggactgcaggtgtgatcacacagtgcttcatgttatgatcagtgattttttttttaaagaaaacctttttattaaatttggcacctccaactggaaaaataaaaacaggtgtctgggaacattttgtatttattaatacaaagccagtggtgagtgacatgggacactg

SEQ ID NO: 52838 - DNA, 323 bp, Mus musculus
  source 1..323: mol_type = other DNA
caaaatgcagcataatgtctaaatcgcatagaacctgtgtgctatagatatttaatgaattataggtgttagccaaattagtggtcaacagtcttaaacagtgttacaggctgggtgtgcttgctcatgtctgtaatatcagcactcaggaggctgagacagaaggattgccacatgtgagaccctaaaataatgttatcgaatttcccaagtagtattttcaaagatggaagacacttaagtattttatatctaagttctgggtcagccagtgctgcaccatgagatcctgtctcatctctggattgaccttgattgacgca

SEQ ID NO: 52839 - DNA, 339 bp, Mus musculus
  source 1..339: mol_type = other DNA
cgttgctgtccaggccgttgacatccccttcaaggtcagcacacctttactctcagcacttgagagactcaaggagcaggtgaaaacaagcctgggttacacagtgatgcccccactctggggatggcactgagagaatcttctcgagtgtttccgcagccgaggcggtcctccaagtcccgggagaaggctccggtacgagcctcgggagctgcccgctctgccggtgcggggaaggccaccaaccggaagcgcgtgggtcgggggcgcgctcgggcggaagaccgcgcgcgttgggttgggggcgccgcgaggggcggggccagcgcgcgccggggg

SEQ ID NO: 52840 - DNA, 274 bp, Mus musculus
  source 1..274: mol_type = other DNA
gagctctccctgctgactgtaggtcaggcctggcttatcttggcccttctggggccacctaaggatagagcagggtcactcccagaagagagcagtccccgctctggatagtgtgcagtgcggcccctacatgcccttggagtggcctggaggggtccttcctccccgtctccctccctgtcgtgaggccaggtgggaagcggcttctcattttcatgaataagtgataggcggggccggcagagcgctgcgttaggctgagcctataggttcc

SEQ ID NO: 52841 - DNA, 504 bp, Mus musculus
  source 1..504: mol_type = other DNA
aaaatgttaacttttaaacctatcgcttagtagtggactcccaagcctacgcagggtcggccaagcacagagtgctcactgctggacccagtgactcagctttgggcaaccgtagtacccgaaggcggcctgctgttgagaccctgaatttctgctcagccagggacagtccagcatgcaggggccgcgcgcgccgtccttgaaggtctgcccggctgaccttgctccgctttcacggaggattctccagccgcgcacgaggacgctgccgcggtgactcaatgacctgcgtaccgcatgcaaatgctcgtctcgatgaggttgcctctgcggtctccccacggcccggcgtcctgaggttgcgtcgcccacctcgcctccgcagcatcggaggccaaccttcgcactcccgggctgcgggcgcggggaccagacgcgctgttccccggtcagctccatgcgcctggcgccccgaatcccgagccagcccagagtgggcggcgc

SEQ ID NO: 52842 - DNA, 387 bp, Mus musculus
  source 1..387: mol_type = other DNA
ctttagacttcagtaagctaagtgtgaatgctaaaattataaaagtaaacactcaaaggaaaacctgccagcgaggactcagtagtccttgccatgattctctttcataaagatattctcatagtatataaaaaataaataaaaagatgtacacgatctatcatgtatccatatccatcaatgtcaggatttggcaaactattttgttagaagtggcatacatgctgctgatatcactaccaccaccctgaaatagaataggtttcaggatgctaagagtgctgacagcagctgtggacacctctgacaatcttcaagagtctcacaggagctgacctggaagagtcttggctgccaatcctgattctctcatacccggggaagcac

SEQ ID NO: 52843 - DNA, 614 bp, Mus musculus
  source 1..614: mol_type = other DNA
gcgtgcctgtgaaatggctgggccgggccagtgtatcgctgtgctgacggtgtgcacagcccgggagaataagaccacaatgtgtctgcgcctgcagtcaggcttgcacgtgcgccagcctctgtgcgcacgtccccgagtgacctgtgtgcggtgcccggggacctttgggtcgtgtgcactcgctgcctgtctgcgctggcgagcgcatgggagcacgtctcccgtcgtgtgcacgctccgtgtgcacgccgcccgcgtgtatgtgcagggcgctgcgcgctgcggcccgaggaccgcgccaggttccacgcgccccgcgtcccccccccgcaccgcagcgggccccgcgattggccgcccgctccgccctgcgcgcccgcggtccccgctgtcccccgcggttccggcgaggccgcgccgcgctgcgctccgctcccattggctgcgcgcgcctttgtgtggcggcagctgcggccccagcgcctttgaatgtcgagaggggccgggaagggagcctttccatgggccatctgtctccccgccagccgccgccccgccgcccgcgccccgcgctccgcctcccgccccggcggctcccgcagccccgccgc

SEQ ID NO: 52844 - DNA, 410 bp, Mus musculus
  source 1..410: mol_type = other DNA
cttccctgaaaagattctcttagagtgaacctcaaaagtcaaatcccttataggatttagaataaaataaaaccttttaattcaaaaaaagacttgcatatttattaaaaatgcgaagtgtttgaccagagtctgtttctcaggatccacataaggtggaaggacacagacgactgctctcagtgctccacaagcatgcttggtactatacaacactactactactactaattattattatttcagtaatttcggatagttcaggacctgagctgcactgtgcaagagctaccccggcctgccacagcactgcggtggccccaggcaggtgacgttcagggaatgtattcgttcatttttagttctaaacttaaaaaagaaaaagaaaaaggtcaggcgggctggctgcc

SEQ ID NO: 52845 - DNA, 503 bp, Mus musculus
  source 1..503: mol_type = other DNA
tataaataaataaacaaataaataaataaataaataaataaattttaaaaaaggtacagatgactatcattttcttctcttgtgtcacccttcccaaggcgggctctgtgtcaccggcaggtggcgcgctcgccgcaagccccgcggcgtttccagccgagcagttcccgggagccgagctgtctttggcccccggggcagccctcgggaagcggagccccatgcttttaaggctcgggctttgcccggcccgccatctcggccctccgagaccgacgttaccggatcgaacggagggcgcgcgcgcgcgaaagcccgggaagcgggagcgctggagcccgcgctcagcggagggcgcgcgcgtgtgcgtgcgcgtccccgccgccagatggcgctgcgccgctcgctcccggccggccgccagctagcttaggttcccgccgccgcggcggtcgctctagccggcaggcgctgctctgtggttccgggcggaagtgaggcgc

SEQ ID NO: 52846 - DNA, 503 bp, Mus musculus
  source 1..503: mol_type = other DNA
agcttcatctcaagtttgatcccagagatccttaaaacataatagaaatttaaatcaataagtcttaaggacatttaaatccttgtaactagggtagaacaaaaagttaattttgttttgtctttgagatagaatcttatatcagtatacctgggatatccaacccaggacttcctgaatgtcaattcctagttatgaactccaacccctgagagtttttgagtgtggttgttttagacactcttatatacacagaacttacagtgtcactatataatggaggctgaccttgatgcaggtattacaagcatgtgtctgctgactaaaaactgaaagctgcagatatttttttaagacaacttgattcaagcgagaattataagaaataaaaaataaacagattgtttctagcagcgtttctcactttgatgaatgacagccctgtcccagggtttcattgacctccccggccccgaggggcgtgcccaacggcgagggggcgg

SEQ ID NO: 52847 - DNA, 570 bp, Mus musculus
  source 1..570: mol_type = other DNA
cttacccagaaagacactggttaggaaggaccatagaacaagtactttgtctatttccaaacaagaagctcacactgtagcccaggctgggcttaaactcagtcttctgtctcagcttcctcagtactgggattacaggtgtgagtctccggttttctctctgaaaagagttgaagctcacaagagagggagcagaaagcagcctggcttctaccttaactgagttcagattaagatatgcaaagttaaaaggaaacatggacatttgaattggcattttagactaaagcctgcaatcccctccggggcggtgtgtgcactccattccttgagcgatagcagcataggcgaaccggttctctcagtcgttcagacgtccggcaggctgtggtttggactggccaccgccctccgcagagctgctggaccggccgcgccctagggtcagggcgggtggccctctgcaggtgcgcgaagcgggcaagcgggcgggcaggcaggcggggcgcggggcggcgcaatcggggacccggggcggcttcccggggtgacagtggaactccaaagttg

SEQ ID NO: 52848 - DNA, 239 bp, Mus musculus
  source 1..239: mol_type = other DNA
atggtgaagatatcagaatgcttgttgcggggggggggggggaccctcctctggcaggaagtcctcatacccatcagcctagcctggagcttggggtgaggccgtacttaacctgcctctgcaggtgcagcacctgactaaacagtgttgacagacccgaaacccagtacagtctttgttttaggttttgagacagagtccagctatatatcccaatattaaacctgggaaaccagttt

SEQ ID NO: 52849 - DNA, 458 bp, Mus musculus
  source 1..458: mol_type = other DNA
agggctgacctttcaggagagttcaataaacaccgtttaaagtactttagaggcatttcatttttctttttaatattttatttatttattatatgtaagtacactgtagctgtcttcagacaccccagaagagggcgtcatggttgtgagccaccatgtggtcttttattaaaagctggaatcgtcaattgaaacaaagtgtgcagaatgtacactgaatgtttttccgtagcccgcaaattgtgaagtaaggatgtctgctataatcataatgtttctttccggaacctggcactacgtggtccaagtagaacttctttctgcgagctgcggaggcagagaggagctctgagtgccatcctactgccagagaggtggaggttcaccctgcggttcacagggcgggccctgatacaggttggcccaagttgcagcccgtacggccttcacgtgacacc

SEQ ID NO: 52850 - DNA, 274 bp, Mus musculus
  source 1..274: mol_type = other DNA
catctttgatcctgataacaagtacttatagcacagggcagcttacctgcaccagaacagtaggtgaaaagatatactatttagtattttttttctgtccatcagatccgccgggcttctgcgggccggggaggcttcagcctcttccaagccgtgagagaggcaacctttcctccgcctcgtggcgaggaataattaatacatttcattaagtccctgtgtggaatcgatagacggcaaacaaattagtaacataccagccatttcccgcgtg

SEQ ID NO: 52851 - DNA, 336 bp, Mus musculus
  source 1..336: mol_type = other DNA
tgaggttgctatagatatagtgccgaactattgggaaaacaattccatttccaagtccaagacttcaggtaaatctagggaacaattccttgatgctaatttgtgcaagttagtgttgagtaataaagacgcttttgagataatgatcatgaagatgacaaagctcctgagtattcccatggaaggtttcttttagaagatctaacttaattattttttgatcaagcatgttcatgtactgacattcaagatctccaatgtccttatcttctatcaatttgaagacaaaaaaatgtcttatgaacatatgatttgtaaaaatttaacctcttcaaa

SEQ ID NO: 52852 - DNA, 379 bp, Mus musculus
  source 1..379: mol_type = other DNA
gggtctttgctctagtacagtccgatccttttgcataataactcttaaaataattgctcttctgcattatgcatgctttgaaaacacattcttcataactttaaaagtcaatcatgattttcctcactacagctgggagaaggataattaaggaatacatttttatttaatcatttttagatatgaatatagaacaaatagatttacttcaattttgtaaactcattaaagtgatttaagaaatattttatttaattcctgtttcctaaattaaattttcatagtgaattggttctttaagagagctcaaattctattccttgactaaaatcaactctgaaattttatatcttgtttgaaaccaagacttattaaagat

SEQ ID NO: 52853 - DNA, 533 bp, Mus musculus
  source 1..533: mol_type = other DNA
tatagcctaataattccattttaatagtcaatatcttttaaaagttcagcacttataatattagtatgtatgaaatgcaaacatagccaataaaataatcatacctttattcacataagcaatttaaagaacattttctaaaatcatgatcacaattctgtaatgtatattacaatgtacacaaaaagtaaacatgcgattacaaaaatgcatgagacattttaagatagttgttaaagcctgtaagtttcgtcctaacttctttacaaactcctaaggagccaggttccactatgatataagaatcatttctttcttttaaaaaaaaaacagttttagttcttgttgttaatactacatattagttttaactttaactatttctggagcagacctggaggccttgtcctcaccattgcttccctttcccaggcggaccgctgtggagaaggtgcctttggaaaggcacctctgggggcgggactcgggggaggcgtcccgtagctcctcccgcgcgcggcccctggagtccc

SEQ ID NO: 52854 - DNA, 248 bp, Mus musculus
  source 1..248: mol_type = other DNA
ggggatctcgaagttctcacagtgaacctgggcccaccggttccctcctgggatcagctcagccctaggttctgctggggccccctcctgcgtccagtgggtggagggccgataaggagaatccgctcatcagcgggtgtgcatatttctaacatatcaatgacactctgtgtatctttacaaatctttccagaaacagttcaagttaccccaacggcatcactctggagtccgaggctgaagtaggg

SEQ ID NO: 52855 - DNA, 676 bp, Mus musculus
  source 1..676: mol_type = other DNA
ttgatcgaaattcacccaggggggcggtcgagggagagagaggtcgtcggccgctcgccggctgcgcctccctgggcttcggctggggagcggcccgggctcgcggggcgagcagtgtgggctcccgcaccccctctgagggagatcgcggggtggcagtccccgtcggctccgccgcgcggccgcttggactcgggagagggcgcgggaggcaggcacacgggcccgaccccactccagcgctcgccggggacgcgggcgggcggcgaggggacgcggagggggcgcggggcgggcgcggccatagagcagaggcggcggcggcggcggcagcagtagcgaccgcgggcggaccagcggcggcagggccggcgggcgccggggaccgaactgcacagctcgcgccccagccctcggcgcgccgcctccagcgagcctccaatccatcttttggagaaaagggaaaatctaaataatatatatgtacatatgcatatttatgtatatgtacatatatgtgtattatattgccgggctcgccgaggactcctcgggctccggagcggtggcgcggcggaggcggccgcggcgggcgggaagcgcggggctggccggggcgctcgccgccgcctgcgcgcccgggggccccggcgccccccgagcgagggcggcccgc

SEQ ID NO: 52856 - DNA, 343 bp, Mus musculus
  source 1..343: mol_type = other DNA
ttttttcactttcaaataatcttaaaattaaaacatcagccgaggcggtttctgagttcgaggccagcctggtctacaaagtgagttccaggacagccagggctatacagagaaaccctgtctgcattgcatgtttcagtcatgttaagcttcttctgagtgctctcgtctggcttccggaggcacctgcattgacatgcggatgtcacagacacgcatttacataagtaaatgtggtttgggagccctggccacactgcccacagtttgcgccccgcccacagcgccgcagccccgcccaccagccgggttagccacgcccatgccgggttagccacgccca

SEQ ID NO: 52857 - DNA, 525 bp, Mus musculus
  source 1..525: mol_type = other DNA
gagacaggcctgttaaaaggactgcaacacattttagagtatttctattgtctgagcctcttgctgcatctagagcagacagaatttgaaagctccttttccatgtacaatccaacttgagaaactttaattctcaaaaattctcaaaaggtgtgacacaaattttcttaacaagaatgtagcaagccagtatcctcagggggcggggccacccacttggcttccactggctccacccccattccatgcaaaagaagtcagagcgtggtcgatgacggcctcgccccaccccttcaattccttaaactctctctcgagagcttgcccagagggggcgaaggctctagacccagggggtccaggggagggggctgcggtaggccccaccccctccacagcctcgaggcctgggggctccaggggccctgaggggcccgggaaaagagcccagggggtccccaggcacactctacacccattggctggcctcgtcggcatgcaaatgaggcgacgtcacttcctgag

SEQ ID NO: 52858 - DNA, 528 bp, Mus musculus
  source 1..528: mol_type = other DNA
ccagtaaatggttaaagtggcaaacttaaacacgtgtgtgtgcgcgcgtatgcgtacacacacacacacacacacacaattcctacttgtaatagccaacttgattatatccattttgcctatggaagcatggctgaagtttggccaaagacttgccatatttcagcacaggcaaggatttctgagttcgaggccagcctggtctacagagtgagttcctggacagccagggctacacagagaaaccctgacgcgttacgaggtggggacgcttgggtctcgaccgtgctctggagcacttgctaaagaggctgagcgcgagattagactcgggtatccccgccccctcggcagaggcaccgagtcgccaagaaggcgagctcgacgcgctcaccgacggctcgctctgcgcaggcccagctcgctgggcggcgaccaggggtggggtggggaccaagaggccgacggcgacgtccccgcgcatgcgcatgacgccagcgtgcgcctgcgcagcagcgccgaaaagcg

SEQ ID NO: 52859 - DNA, 339 bp, Mus musculus
  source 1..339: mol_type = other DNA
ctttatgctctcaagcacacaatgtacatgcaagatctcctggaactggagttattgaggagccatgaggggttctggccccatctgtttaaacagagttgcagagcaggtggctcaatgcgctatctctgggccagccacagctcagattcgcgaaaccagctcagtcttggtgtctgagcattgagcagttaagtcggctgctggcagctgtgttgttcctagacaaaagctaggatttcacttacagtgatggacagttgactgtcttaatgcatttgcgctgtgtgcgccgcgctacccagcaaagccggattggccagctgctgctggtctggt

SEQ ID NO: 52860 - DNA, 417 bp, Mus musculus
  source 1..417: mol_type = other DNA
ttaaaacagttgaaatatcttcataatgtatgcctgttttatagagatggctcagcggttaagagcactgactgctcttcggtggctcacaaccatcgtaatgggatccgatacactctcctggtgtgtgtctgaagacagctacagtgtactcatataaatgaaaataaataaatcttttttttttttttaaagaaaaatccttaaaatctgttccccaatcttgagtgggcccagttcaagatgcttaatgtcgcatcttggagtatccgtgaaggtccttgcacaacaggtactctagagcctagacccggtagctctcgccttaccagagagtaccatagtgtgcagtactggacgggactaacatgcatcatgagagccggtgtgtgctaaatgggaacacctacttcccct

SEQ ID NO: 52861 - DNA, 209 bp, Mus musculus
  source 1..209: mol_type = other DNA
tattatatgtaagtatactgttgagctcaggaccttcagaagagcaattggtgccctctatcagatgtaggctggtaaagatgtcaattcttgatcttagagcataaacctgtgggcccagagcatgtgggcccagagatgcagcactgacggaggactcacacatgcctgagcatggccacatgacagacttatttggtgaacctgtc

SEQ ID NO: 52862 - DNA, 265 bp, Mus musculus
  source 1..265: mol_type = other DNA
atggtgtttcctgtaaaccagagactttcaaagacccctggaatcccggggaggatggcgtcccaggcctgtgcccagcgcgcggcgctagctagagaccggacacgcagcagagcagagtgcccgccacctcttctgtcccacccggtcgcgagcgcgcgtgcgcgcgcgcgttaggacccagcggggtagccgcgggaccctggagtgggcgtgacctccattgtgacgccacggggcggggcttcctctggctgggactgag

SEQ ID NO: 52863 - DNA, 526 bp, Mus musculus
  source 1..526: mol_type = other DNA
ctatacaattacaacaagcaattttgaaggatttttaaaaattttttcttggtttaaatctagaaacagacacctctgacgctataggctacagcttaggctgttcactgaaacagccccctcctggctcccattagtaggcctgatacgcgcaccaagcaggacctgtccgccaagctcctccgccgcgcagcagactagagaagaaccgagtctaggcccgccgccactacgggcgtacggacagcactgcggagcgggacctgcacgacgggaatggtgggaccacggtccgcgatgcatgaatacagcggtccgcgccgaatgcgggagtctgaagtctcccgtagtcggaattcgcgagatgacctgtagtctgacatggctgtggtctcaacaccacggaccggtgctccgtgggtgtggaccagcgcctctcggctccgcgagggccgagtgtttgcccgccgcttgagagcacgcagtcacgcggctgcacgtcgcctgccacgccctccgtgacgca

SEQ ID NO: 52864 - DNA, 555 bp, Mus musculus
  source 1..555: mol_type = other DNA
tttggtaattttagtaaaatgattgcttcaagttgcagcgctctagtgggtttcctcgggcagcaacctggaggaagttgggaatatacatatatagatatatcagggttagtatatatttccctgttttggtctttttcctggtgcagggaaacagcaagacccacggctgtggactgcacaccacgctgaacaggaaccaggggaccggctgcggggccgggcggcgggtccaggacgcagctccagccccggtcagccctgtactgggtccgggagcgacggctcggcccggcataggctgctgcgctcccctggaggcggtcagctgcgctgaggttggggcgcggacgccagggctgctggcagggggctagagggccgggggtggacctcggaccgcgcggtcctgcgggcacgagtggagcctgggctacgcttgggctcgcgcgcgcggagtttatttaaaactaggaagccggcggccgcgagccgcttgtttatgtaaacccggaaacacccgggggggcgggggccgcgtcacgccggggacgc

SEQ ID NO: 52865 - DNA, 372 bp, Mus musculus
  source 1..372: mol_type = other DNA
agcagccatttcctgtggaagagcctgggctctaatccaggcctatccaggacagaggctgggtggatctccagatctcacagttggaaaaaactacattcccatcgaggggccagtccacgcgtctcaaatggcatgggctctgaatcgtgtgatcaagcgcttatgcataaaccatgtgcattcatgcggaagccatgcctttgtccctcgtcccacacctggagcttcccaagccacagtgggggcctcgccctgggacccgctgggcacgagggggcgccgcgctaccgtagcggggactcgctggccagggcggcctgggggcggctcacggggcggtgccggactctgagctgtgggctctgggga

SEQ ID NO: 52866 - DNA, 594 bp, Mus musculus
  source 1..594: mol_type = other DNA
ctaagtctttctatgagaatagatgaaaataggctacagcattctcatgttaaacatgtcaacatcaatgaactttaaatatataattcctagtttgttagctaatcacaataacatgtaattttaagttcattttgccaaagaatattgcatctgacaattaattgtacttaaacatgattcattgtggggcttcttccttctgaaagagggaagagaaggacatcaccattaggaccttaagaagtgcttatagtttctttgttatgttgacaaatcatagtatttagcctaaatttcctactcaaaaggttctgtaggaccccgttagaccagcagcacctcagctgggtttccagaccacaccacacgggcttcctgtcaggtgcttgaactggcagaggcgtctctaatggctttgtacccaacagaatcgatgccttctatggaatttcattaagaagcagtatccacaattgatagagcctcataatttgatggattgtgctaagaaaatgattagctagctagagtaatttgtacaaaataaaaaatattgattttactgatgtgcaaaattttgaaactaggcgt

SEQ ID NO: 52867 - DNA, 181 bp, Mus musculus
  source 1..181: mol_type = other DNA
ggtacatctacacaatggagtactactcagctattaaaaagaatgaatttatgaaattaggacacattcacaactcctttagcaagattatgagatggcctaggctatagcattgcaaatgtaaatgagctaactaataaaaaatggaaaaaaaaacttctatggatgttttttcatttaa

SEQ ID NO: 52868 - DNA, 310 bp, Mus musculus
  source 1..310: mol_type = other DNA
taccaagggtgacctgagcagctgtgatagatgtatctggaaatatttgccttaggaagactggcaattggacagagtcacttgattctccacctttccaccttccaaaggatgtgaaactccctgggagtctacacagaggattcctgggaagcttccttgctggaccctgtggtctcagctccaggagcgtagggcggtgacgagcaaagccccgccccaccgctccgagggctgccctgccccctgggtccccgcgtgtcccccgccctcccactgggaggcggggcgggagcggggtgcgcgcccg

SEQ ID NO: 52869 - DNA, 243 bp, Mus musculus
  source 1..243: mol_type = other DNA
ttcaagagactgaagaaaaaaactagatattgagatttgtttttttttcttctacaaaattaaaatttggtaactacaacataaccctcaattttaaagtttcttttatgaagcatagtattattttctttgggtaagaaacaagcatggtctgaacattttaattgcattgctaaaccatggccagatttggtagccaatggaggcggggcctgtgacgccatcagatggcgccgcgcgggg

SEQ ID NO: 52870 - DNA, 581 bp, Mus musculus
  source 1..581: mol_type = other DNA
tcagccttaatctttaactgttaatctttaactgaactttcttgtaacttttgagaactcagctctggtactcatgccttgcaaaatggcgttactgcagctagcttgctaagaacctcagctttccaaaccttgggataaactttaaggcttgaatggagcctactaggggggcatcaccaagtgaaggtctaggcaggtactttcccttcacctccgaccccttccgtctcctgagtagttgggggtgaggttggcagtcccgaccggcgttcaaggtccgggatggcaggccaggggcctgcaggccggctatgccggcggctcgccgagctaggtgacgccgccgcctgtcgggccgcgcatgcgcacagcggcgcccccgcccccaccgcccgctcccaacgcccccgccgcggcccgcgggccatggaacccgccgaggcccgcgcggtccgagcgctgctgcccgcgcgtccgggcgccgtcgccccgtgagcccggcgggctgggtccggccgccgccgccgcagcccgcccgccagcccgcccgccggtgccgcgcgtgcgcgcccgccgag

SEQ ID NO: 52871 - DNA, 274 bp, Mus musculus
  source 1..274: mol_type = other DNA
cgagccagaggcctccagcggaatccgggagagggattgctcagtgccctgcttcccccttttgtcaaacgaccgcttacctgcggggctctctggtacagtgagcaactcagggcttgattgctgtgggctctcaggccatcgccctctggagtggttcttttaatgagaaggttagctccctctggttggggcaagctaagaaagcggctttgtccccctctaggcctcgtacaggcggctgcttttcccgagatgccccgggaagggagga

SEQ ID NO: 52872 - DNA, 428 bp, Mus musculus
  source 1..428: mol_type = other DNA
ccagtgctgcgccctagccccgactgctctgaaccgagacccctgtggggaccacagaccttggaaggcacagtgtccacaccaggtctgcagtgtctgcgtgcaccgaggtcacctcgagggtgcccccgccccgagagttcccacttagttgcaagcccgcggcttgaggaatgggttgtcccggccgcccggcgccgctgggggggcgtgggactgggggggaggttgcgcgggggcagggcaccacctgcccgccctagaggcgtggcgtgctgctgggggcgggacacccacctgcctgtccccggggcgggggcggcggccgcttgttgcgggcttcgggctgcggggggcgggccgtgggcggggcgctgaaggggaggccccggtcggccgccccctcttctccggcgcccgccccccgc

SEQ ID NO: 52873 - DNA, 338 bp, Mus musculus
  source 1..338: mol_type = other DNA
taaaggctgagagcaagagcgcaacatgatgatttatatgtcgcatgatgatttatatgttgcattaattattctgggaaaccactagggtttcagagagacagtgtctgacacagggcgctctcccattggtgacacaacacagggcgctctcccattggtgacaccagggcgctctcccattggtgacaccaacacctcccattggtgacacctggctgcatagataccaaagcaccgacagtgccttagcagctgctgattgcttacttacagcacatcagcgatcacactgtgggaggtggcaagcatccttgctggctgcgtctgattattta

SEQ ID NO: 52874 - DNA, 388 bp, Mus musculus
  source 1..388: mol_type = other DNA
cccctggcctacgtcaccgcggatcgcggggcgcgctccccggcccctcctggggagtcaaatcaagattttgattcatagactcaatatattgtcactaactacgacccacggagggtagttcgtgaagttcaggggacacgcgcgcttcatcccaagcacctctgcacgtatgtgtgtgcagaccattcccgggctgggggaagcctcgggcctgctcaggccgtggacgccgggtccccttcactgcacagtgcagtccctccgagccctgctggcgcctgggcccccgcggggccggtgcgtcccgggcgcgcgcgcgacgcgcggaggggggccgggcgcgtggcgggtcccgcgcgtcctcgcgcgtcccccgcgccagggc

SEQ ID NO: 52875 - DNA, 335 bp, Mus musculus
  source 1..335: mol_type = other DNA
ttaaatggcttcatgtaaacaaatagcagatactcacataagatctgatttcaactgtgggaagaatgaatacagttaattcaaggtttatttaatgccttgggatggggcttttgtattaaaagccttttcgtacgaaagagaaatagcaagctatcaatcagtgtgtttgatgcaatgataacagggagcaaaaggctcattgccattcgtgtcgcgatcacatgatggccgcgactctaccgtcggtagctaagctgcgacgtcgccccaacgataattctccgggagtcgctgcgccgcaatgagctgagccagagcgccttctgattggc

SEQ ID NO: 52876 - DNA, 197 bp, Mus musculus
  source 1..197: mol_type = other DNA
cacttcagcagaggaggcgctgcaggcgagcaaggacgcagctagcccccaagcaagcctggttgtggcaaagtctgtcaggtattggagaaggggcaccttatctccaattctgaacaataaagtctttgtctctctcatgtgagcagcagctggcaccaaatggtatggaagcatccagtgtccttagagagatg

SEQ ID NO: 52877 - DNA, 316 bp, Mus musculus
  source 1..316: mol_type = other DNA
cgagcgcgccgctcgcgcgcacagctttcccactgggagagaaggaaagatcttttgccaatttttagctaattgtgttcactgaccaaatgactgaccaaattattcaccctttaaaatagggtcaacattaaatatttccgaacatttttgtgtttgttttaatttaaaaatgtctcctgttttccacttaacctctgagttgcagttcacccaagagtggttcagatccacgtgggcgtgtgtgtatgcatgtacacgcggcttcttttctgtgtcatattgtttagctccgaaaaaaaaataaaagaaaaca

SEQ ID NO: 52878 - DNA, 420 bp, Mus musculus
  source 1..420: mol_type = other DNA
cttctgcttgcgccacaagtggtggttacaaccaatgctccagcactggtcacaaatgccaggtgatgtctcctgccactggtcttcagtgatctgtgccagctgacctgaaactacaagggacctctgggccttgcctttggcaatgggaatgaatttaagtcaaacttggccttagccaaagctttcaggtcaaacctttgccatgcatgggtgacagtgacacacttatggtaacagtactatactgtacattgtggaggtctcactaccttactaagtagtaaattcagagtctaagttagctcatagggatgtttgatcataaggagctttgctcctcacaactgctgccttcatcttgagggagggcggctccttgaaggaggccccgccttaactgcagggatccttggaccc

SEQ ID NO: 52879 - DNA, 578 bp, Mus musculus
  source 1..578: mol_type = other DNA
atctttttctctcccagtgggaaagctgtgcgcgcgagcggcgcgctcggagaacgggaggcctaggcccaaggtgcaccgtgcactgagcgccctcggcccgcaggaaggcgctcgtgcgcgtgcaccggcgcccgggctccccgcccggcccaggccctggccccggccccggccgtgccccgccgccccggccgcgctcggggttgagcacgggaaggggaggcgcctgcgccggccgccggccgccttgccgctcggggacgcttgggctaccgcggctgcgatcgccagggcgctggccctttagcttggcgccccccgcccccggtgaaggaatcgaatcccttcgcagagcgtgcggagggtggggatatccggggcctctcccgcgcccggaggaaaggggagggcgggagcagcggctgcagcggccgcggggccgggcagggatcctggggtggcgcgcccgggttccgcgggggctgcggcgcgcggaggggccggagggcgggagggcgcgggccggaggaggggcgggcccgcccgcgcggagccgagcggagccaagcggcggg

SEQ ID NO: 52880 - DNA, 344 bp, Mus musculus
  source 1..344: mol_type = other DNA
ggaaagatcttttgccaatttttagctaattgtgttcactgaccaaatgactgaccaaattattcaccctttaaaatagggtcaacattaaatatttccgaacatttttgtgtttgttttaatttaaaaatgtctcctgttttccacttaacctctgagttgcagttcacccaagagtggttcagatccacgtgggcgtgtgtgtatgcatgtacacgcggcttcttttctgtgtcatattgtttagctccgaaaaaaaaataaaagaaaacagtctgaaaagaggagagagggagagcgcatctcctctctcccaggagtttgggggggacagtacacgccca

SEQ ID NO: 52881 - DNA, 360 bp, Mus musculus
  source 1..360: mol_type = other DNA
tccactctactctttaagatgagacgtgtaaagtgattttggccatgatatatatgagtcagcaatatagactaggaaaggttgactcttgagtttagagttacgtttcaggattgtaattcccaaccttttcatgaactagggtagcctgagaaccccagaggctctaggccgactcctggggggcccccgatgcagaggaaggccctagcgcaggccccgcccctgcccttcccagcaccgccctcgggttcgagggacatcctcgggaagacgacaagtcctccgacgaagaaccggaacctgttttctcccgtagggacttccggaaagtaccgctgggctcgacggagaggcagg

SEQ ID NO: 52882 - DNA, 484 bp, Mus musculus
  source 1..484: mol_type = other DNA
cctgggccttccttcccgggagggtgcgggggaaccggggcgggatagatgcagggcccggcggtgcctggggcgccggggcatccaggtgggagcagcggatcccggcaggtccccgatcctgcagtcagcccaggcctgagtcaccccaggccctggcgcgggcccgcggttttggcgatcttagcctgggaccccggcctctccctccataggggcgggataggatccgcagacctccagaagtgcgaggtcacctggcccacccagttcgccctgaggcgccggatgagctgtctgtctgggccagggtgcagggaggacggtcctcgccctgggcagggtccagctggaccttgcctctaggaggatcggagagagtactcatttgtaaagtgtagtagatgtttgatatactccgaggcaaagacccgatcttgggtgatttcaactgaaggccttgatgttgggtgaagtgcagtgt

SEQ ID NO: 52883 - DNA, 538 bp, Mus musculus
  source 1..538: mol_type = other DNA
tatgtgtatggatatgtatatgtatgtgtatgtgtatgtatatgtgtatgtatatgtatatgtatatacacacatatgtacacacacacacatatatatgcatacatatatatatgcatacacacacatatatctgagagagtgtttaatccttagtgttaggataatacaagatatattattaatcttcattattattatcattatgtaacaattaaagaaaaagagacatagtaaaggaagtgatattattgtattttaatcaaacaagaaatttttaaaatatatatatgcatataactgtagaaaagtattatagagtcatcagttaaaagactattagtataaaactctacactatttaaagaggaaaagctcattttattttagaatattggcagtatagcgctgcacagaaggggacttctaggaacccactttgaagcaatccagccgaggaggggcgtggccacggccggcagggcggggtcgcgggtcgggctggggcggggctagccccaggcctccggacattggc

SEQ ID NO: 52884 - DNA, 368 bp, Mus musculus
  source 1..368: mol_type = other DNA
ctgggaggccaaggtcattagttgtcctcagctgaattcatctctcttaaaggtgtgtgctgccacacccagcatttttatagagatgtctggaatgataatttcctctgtatcaatagaaggttaatagttcactctgttggtagggtgcctgcctagcatgcaagaaaccctcgaaaaaggtctaacctttttaaaagtaagtgcggtagatttctgtgagaccaacctggtcaaagcagaaagttcccaggcttgtatagtatgactttctctcaaaaagtaaaatgcacagtaaatccatgtgatttcaaagtgcccacttttccttcctttggagcaggaaggaaagatcaatctaagcctcc

SEQ ID NO: 52885 - DNA, 495 bp, Mus musculus
  source 1..495: mol_type = other DNA
ttttaaaataagtaaataagttgtcttctttagatatctgtaatttatatatagtattgacttccagacaactggggagggactcagtgctgcgctgcgcccagtgttggtccttatttaggatttaaatttacactacagtggaggataagagaaagtctttgccatgtcagggccttatttcaggttaaagaaattattagatgcttctaattttaatgtaacaatggcatggcgcattatttggggccacacatttatttccagatcttaagccgtgacactctttcaaatggtccgttctgaagggaaaccacgcagagggtcactttggctcactgctgagacctctgatcacagggctggcttgggtgtagctaatcaacaccacgcgccgggctgtggtggggacactggccaatcccaagaggccttgtggtctgtgcccagccgccctctcctggttctgggcacagggcccggtggagctgggaa

SEQ ID NO: 52886 - DNA, 394 bp, Mus musculus
  source 1..394: mol_type = other DNA
gtgcaagacttgctcaagctgtgttgcatctgatttaaatcataggtatgaagaaatttccccctgtaaattcactcagaggatacagtcataacaatggaattcctaggcttgttagataaactgttaaggtggaccaaccagctagctagttctaagcaaactgcctcaccctactttgaggacttgtaaggtgagtggccttgtaaagtctcatactggaacgaacttcaggtcagaattggagggctcacctgtgatccagatcttgaggcttaaaaacacaagtttctgatctggatcttggcatggagatcttgcctttaattccgctctgagttcaaggtcagcctggaagagaactaatcccagatcaaggtgtggttgtaacacc

SEQ ID NO: 52887 - DNA, 344 bp, Mus musculus
  source 1..344: mol_type = other DNA
aggtgcctcctgaacctcattaagttttggaaacttcccacgagtagaatttctgggaggcggctattccagaaccagagacttgcagaatagactgttaggggagggcatctgagatggggtctgcagcaaccctgctgcgcctgagccagaggccctgtcccttcaaagctgacagtacctctcaggactctgagcgtgccacccactgtggcctctttagaagagaatagtctagagtccaaacctggagatgtcaccccgggaagtggggagggatgaagccgggagcagatctccgcgctgcgactcctacgcggtgccccaggctcgccgcccctccc

SEQ ID NO: 52888 - DNA, 229 bp, Mus musculus
  source 1..229: mol_type = other DNA
atgaatgaatggaatgcttagtaatacacatcacttccttaggaagaagtaactcggacctgaacccggagcgccccgcggcctgtcccgcgctgccccaggtagcgcccgcgcatgcgttgactgagttgctctgcgaacacctcggcccttgcgaagaaacggaaacgctgaaattgtcatttttatagttatggcaaaagccgttgacagcgcacgcgcaggaaag

SEQ ID NO: 52889 - DNA, 299 bp, Mus musculus
  source 1..299: mol_type = other DNA
gagttgagatcccccgctgagcgcggtcagtctgagctgtagtgctcccacagcttgcatggctgttgtcagcacagaccgggcagcggactccccagcgcgcgaaagtgattctccagcgaatctcctctagtgattaaacgtgaaacttttcgctcttagaccagctggctagagggtgaagtttctaacctttaaaaagtgaaaaccccaactcaaaggggcatttttttttttttttttggggctcctctagccccttctgctggagctggctgagtgaaagagcccagcctggt

SEQ ID NO: 52890 - DNA, 369 bp, Mus musculus
  source 1..369: mol_type = other DNA
cgctcttagaccagctggctagagggtgaagtttctaacctttaaaaagtgaaaaccccaactcaaaggggcatttttttttttttttttggggctcctctagccccttctgctggagctggctgagtgaaagagcccagcctggtcgccccattccgccgcgcaccagccctgggggcaccggctgtgctcagctgccaggcttcaggcttcctggagggtacctaagaggagggctgcggctggacatcctccgggcgacgctgctcggacctggtcccagtcgttgccgtcgatccggaccggtcagatcgggtcccggcttcgggcgccccggggctcgccccgcgcctgccgccgcccgcgcgc

SEQ ID NO: 52891 - DNA, 325 bp, Mus musculus
  source 1..325: mol_type = other DNA
ctattgagccgaatggacatgcacggtatttttaggataagaagggccttccaaaccttttatctaagaagacaggcctcaaaagtctttgtaatggtgctttttaaaaattccatatgtaaaagcccgaggacggcaggctccagcgcccataggtggcgcccctcgtccgtgcggctctccaggcgcagctcggaaccccgcgtgtctccccgggtctttagagcccagagactgcgttttaactccagccccggggttcagatgacatttcactaaccggagattttggaatcgcagtttaaaaccattaaataaaaaatac

SEQ ID NO: 52892 - DNA, 364 bp, Mus musculus
  source 1..364: mol_type = other DNA
aatatttcacttgtttatctaaaaccctgtgcacgtgaatgagacaagaaacagaaaactagttctttagtcttagtatttggtgtctgaattttaaatttcttctcttgcaagaaaagaatgagttatctattttgatattcgaaaagattacaataaaatgttccttaaaatgtaaataattttgtaaatttaacttggtgcatatgtaagaaaaaatgcacttggaaagcattcgaatagaatcttccagttacattttacagcttgaatcatttaatataaacattcagattgcgatcggaatacccacccagagccttgggctgttgccaggtcctaagagcccgcttcacagcccgcg

SEQ ID NO: 52893 - DNA, 591 bp, Mus musculus
  source 1..591: mol_type = other DNA
gaatgacaattgtcagtctggtaaataacacataatttcaagtaccactttctactggacatttaaaagaattaatatcaattatttgaacattgctattttctatatttttaaattagcaagtttactaaaacatagcagatctggaatttacctctgatatatatttccatttgaaagaacttataccattcaagaaacatttttaaaacttacattaattctaagctagattttgtatttgaggtattaatattttctttaattgcttaccattataggaaaaataaatttccattgctatacattagaagcatattgtgttaatttgtaaaaaagtgagttaagtttccataagattagttttcttagcgaggaccaggaacccagagcctctgaagtctgccctcgggggaaaggggcggagccgctcgcacccacgaccgcgggccccgcccacctgggccccctccccacgcgacgccccgcctaccgggctgtgctgagggcgcgggcggccagggctccttcgccgcggctccgctcccgcctgggccgcggccgcgcgccctcccttcggggaggaggaag

SEQ ID NO: 52894 - DNA, 355 bp, Mus musculus
  source 1..355: mol_type = other DNA
acaagaaacagaaaactagttctttagtcttagtatttggtgtctgaattttaaatttcttctcttgcaagaaaagaatgagttatctattttgatattcgaaaagattacaataaaatgttccttaaaatgtaaataattttgtaaatttaacttggtgcatatgtaagaaaaaatgcacttggaaagcattcgaatagaatcttccagttacattttacagcttgaatcatttaatataaacattcagattgcgatcggaatacccacccagagccttgggctgttgccaggtcctaagagcccgcttcacagcccgcggcattgggaacatttcacctaatgctctctactc

SEQ ID NO: 52895 - DNA, 242 bp, Mus musculus
  source 1..242: mol_type = other DNA
aacgactaatactggattgtaaggctgaagatagaactcagatcctcatgtatgtggacccctcaccttgagccatgtactcagacctctggggatgtaataaagcttcctgaattgtaaatacttctgaaggtgcatttcttgaaaagaaagaaatgaactttaaattttaaaagagtacatttagtttcaatttggagttagaatcgagtatgaaaaattggcttggaactctgatttcg

SEQ ID NO: 52896 - DNA, 311 bp, Mus musculus
  source 1..311: mol_type = other DNA
agggaatgctgacctcctgaacccgtggaggcagcctgcatacccaagtgaaaaagcttgctttaattaaggtctccacacgggcatgtaacattacttgttatgtttcaagatagactaacattaaaatcacggctagcagcccgaggacaatgtccctgtactataggacctacacttaagtttaagagcacttctcagcggcagacggcggaagcaccgctagcttcttccctcacctgatccggatccctgggatgccaaccgaaggcgcccggcaatgccgaggccgctatggcagcagccatgtt

SEQ ID NO: 52897 - DNA, 490 bp, Mus musculus
  source 1..490: mol_type = other DNA
cattattattattttttaaaaatctcatctaagtcaatgacacagggacctacttataagaagtgcactatttttataagtatacaatacaaaacttttatactaaggacttcagtaaaaacataaccaagatgttataattaacttccccttttttaagtttctgaagaagcaatcctttttattctttaacattttaaaatatgtttatgatgagcttggatcactaatatacacatttctctcattcatcatagtaatggaccaatttatatgattctaaacaggtttttacacagacgtagagctcagcaatccggtcttttattttaaagcacgaatcttaaaacatgttccgggaagagtcctgcagcacactctctttctcagctttaattacaaaaaaaaaaaaaaaaaaatgcgcgtgcgcactgcttgggcgcatgcgtcacgcatgctgggctaccgggatcctgaaggaggccggcct

SEQ ID NO: 52898 - DNA, 549 bp, Mus musculus
  source 1..549: mol_type = other DNA
tttagctctttacaactgctaagatcttataacagagaagtggcaagataaaccactttcttttttaaattgtttatttatctgtgtagccttggctgttctgagaattgctgcatataccaggcctctgactcccaaattttgggattaggctgcttatttttaaaattatatgtctatttttaaaattaaatatagtgtatatttgaatgtgggtttgtgcacttaagtacccaaggaatctcctggagctgttacagatggtcatctctagtatacaagataagtcattttaacaaatgtgctgaattgggtagtttaaaataagagaaaatgtaattaaatgtattatgtatgtatttatgtatgtatggttacatttcctgcgggaggtgtctgagaaacactttcagctactttcccaaagctaagcgtttccaaagatgcttgaaacagttgtgtagaggatcactgagcaccagatgtcctttgtgattctcagagtgtgtgacatcacagggtaaatccctgccttagtaatagcagagt

SEQ ID NO: 52899 - DNA, 366 bp, Mus musculus
  source 1..366: mol_type = other DNA
tgggttaccctgggtcagttacttcgcctatccttagggaaatgcattacaggaactgcactctgaaattcaggaatgctcaggcaccatacatgactcactacagggtctcctgtagcccgggttgacttcaaattggctacgtagccaaaatgtgatcgtctctgtgtgttagccattcacccagccggcctgggagtcccgctccagctccagcagctgtagctgctgggccacgaggtggacggccatctgctccgcgatgcagcccctgtgggacccgagttccagtcggaccgtgttccccactggacgccctgcgctcccagccagggcgcggattcccggccggtccgtttcctgcgt

SEQ ID NO: 52900 - DNA, 289 bp, Mus musculus
  source 1..289: mol_type = other DNA
acacgcagggcctggagctgcagcctgggagggcgccccatctggcgggtagaccgacttctgaatccaggacctggcgccaacctgcccccggatgtcaaacatctgttctcaaacttggccttttttaaaaaaaaaaaaagagctgtttgtctgccgttggcaagctcgggacttagcctcagccccgccccgtccaggccccgccccgtcctgcccgcgctgcagcccagctgggctcagccaatcacccgcggcgcgcgtcggtgagcctggcctcgcccgcccc

SEQ ID NO: 52901 - DNA, 324 bp, Mus musculus
  source 1..324: mol_type = other DNA
tgggacagttggccccgagggcctttcttccaggacgtcaggttcccagcttggtagacacaagaatgcagccttgtgcccaggctggtcagagcagtcagggctcttactctccgtttctattggaccacatgcacatacatgcttgcatgtacaaatgtgtacactcacactcagaagcccagggttccaaacatctcatcacataagctgtagtgtgttagtgtgtcccacagtatatccgtctccacacatattcccttgcaacaaggagtcattggaagaattcagtgccctgggtctgggcctgggcagtagctgagc

SEQ ID NO: 52902 - DNA, 431 bp, Mus musculus
  source 1..431: mol_type = other DNA
ccacaaatgtatatgcaaatacgcattaagtgtaaataaacaaaaactgatggcacaggattttaattcagtactgcctgagcaataatagataaatgtactgagtgactcacgccccccccccccccaggttggaccgttagggaagggggcggggccatctctgcctggacagggcgggccttaacaggggtgggtggggcctcccacctagcactaatacagtactcaccaatgaaattttcaaagtttaaaaaaagggagcctcagtttcccccactaggtgcaggagaggttggctgatacccagtccctccagcctccatcaaaggctgccttgtgggctgtcatcttggcagaggccccacccaccgcagcccaggctccgccccgttcagtcagagacgggccccgcccctttccctaacggt

SEQ ID NO: 52903 - DNA, 657 bp, Mus musculus
  source 1..657: mol_type = other DNA
agtccctccagcctccatcaaaggctgccttgtgggctgtcatcttggcagaggccccacccaccgcagcccaggctccgccccgttcagtcagagacgggccccgcccctttccctaacggtcaacggtcgtccagcctctcagaagcaaggcgagctggacggccgcgtcgtgtcgctgttctcgggcccagtggccatggaggacgcgctgctcggcgccatgactggccccgaagacgagctgggcgccgagctgttcgggtcagagcgtgtgttcgcggacgggctggcgctgagccccgcaggcggtgcggccgatcgggatgggccgacgcctacctgggcgccaccgagccaggggagccgctgctgcgtgcgctcagccccccgccgggcgctgaggtaccggccgccctgctcggcgacttcccggggctgcccgagctccgcagcccagacgacgccgctccgcccggtgctcgcgggcccgcgctgttgccgctaagcgcaggagtgcgcgtgatcccagtaagcgccagcaggggccaccgtcgcgccgcctctccgcgtgcctatcctgtgggctggccccgggcagcaggctcaagggaggtggcacctccctgcccagccttttccccttccgccccagca

SEQ ID NO: 52904 - DNA, 378 bp, Mus musculus
  source 1..378: mol_type = other DNA
acaatcagttaatgtgataagctgctaggtttcaggactgcaagctccagcagccccacatgaccaaaaagcaattttgggagaaaagggtttgtttaactttgtattgctgttgataatcaaagccgagactgccagcccagggatggaaccaaccatcagccactaattcagataatgccttacagccagactactttatgtatcaagttgacataaaactgattgtcagtcaatcatgcttaaggttctcacatctccataaaacttgagacatgtgattcatgtaatttatgtcaaatagcccaaagagttgtttgtgagctttgagaacaggccaggacatgcccgggcaggccccttgttacatgtcctgac

SEQ ID NO: 52905 - DNA, 489 bp, Mus musculus
  source 1..489: mol_type = other DNA
gccagtgttcatcaggacactgaggttaacccaagtgacgctcatgtgatggcgaggctgcttggtccagcaaaggagccatgttaagccaagagcagaaactctcttctctttcatgtacaggcttctcaggacctggctgacaatgctagtgagacttctgagtcaggtgacagagcactcctatgactcacacattgggagtccggagttgcagctaaactcccagggcgtagacagctctactccttggcaagaacctggtcctagcaaaccaggagttgggctctggggtggtccataccagcccagccctgggaaggaaagcaagacctcctgtaggtctcaggaccggaggtgtagggactcactgactctcctctcccgagcctcgggagcgagagcggttccggtcacagcggcccttgggactcgcaggaggcggcgctgagccggtgacgcggcagctcccactgggcataaatagcg

SEQ ID NO: 52906 - DNA, 253 bp, Mus musculus
  source 1..253: mol_type = other DNA
gcaagacttgagagtagggaccctgatgtccaggaccccagttctggggtgtagtactatacgtataggacactaagaaattcatgtgtaaaattcttctctgtgacaaaagatacagcctggtttcctttgtattaagaaatgaagtaatttaattgaaggtcttcgataagtcacgcgaggccccgctgttgctacggggcaccggggtctagaggttccggatccgtcaacaagacctcaaagccaatcg

SEQ ID NO: 52907 - DNA, 367 bp, Mus musculus
  source 1..367: mol_type = other DNA
atctatgcagagttccaaataaaatacaaacattatgtatgggaattttgcctactccaatacatattatgtatgtacgtgcactggaggccttaaggcaaatctcctggtcagatccaccgtgtggatgcttttaaaattaaaagcaagtctcacaggctttccatttcgtcccaatgccacgttaaaattccaaagaaatgccatgcctgaagagcctcataaagtacctcatgaggccttctagagctgccctgtccagaccagccatcgtccgagtacatctgcgctcacctgatccggcttctgggaaaagccaagcaggcgcgcccaccgcacgcggccgcgcgtgccagcgacagcctat

SEQ ID NO: 52908 - DNA, 350 bp, Mus musculus
  source 1..350: mol_type = other DNA
tgcagcgctgggagagctgtgcacactgctcctgacaggagggcaagtgccattagcttactttctaaggaagcacttactgctctttcccgcatgtggtgcacatacatgcgtgcaaacagagcccaaagctggcttcggagacctttggcttccagccctgaggcctcctgactgtgtcagtttcctcacctgtcagtacagagacttggcaggtgacccacctgcttgcccggcctctcctgtcgcgggcccggagagacccgcctgcccggctcccgggcgcccgcaggagggcgcggcttggcggggggcgcgggcggcgcggggggcggagaccggctcggctt

SEQ ID NO: 52909 - DNA, 169 bp, Mus musculus
  source 1..169: mol_type = other DNA
cccactcccaagatggtctgtagactgaggataacaggaattctggttttgaagaaatataccttcccagctatgttgcttctccatgcaggctggggccctcctgcctcaaacacgttttcataacctctggggattaccctgaggaaggggtggggcttcaccatac

SEQ ID NO: 52910 - DNA, 481 bp, Mus musculus
  source 1..481: mol_type = other DNA
caattacttcctggaaggactgaatgatggggccttggcccccttccatgccctagggcaaaggtacatagcacctttggccggcaagttaggaagatgtcctgagaatctagctgacatcctcagcaccacggacagggggaggcttctctctgagcggagagcgcagccagctggcattaaaaacacacccacagagctcctttgggagctgccttgccctaaggtcaaaagtccccggggcctttcaaggcgtctaaggaaagtttccctttcactgcagaagcctcgcctctcctgccctaagaggctcgagtccgcaaaggcgccaccacaaggccccgcccccggtgcgccgacccctccctcatcgtggactcaccgcctgagcctaggaggggctgtgccgcagccacaatcagcggcgagcgcgggggcgggcggtgacgctgggctctccgcgtgcagcgctgtaaaggag

SEQ ID NO: 52911 - DNA, 448 bp, Mus musculus
  source 1..448: mol_type = other DNA
accccgaccctgtgtgggcacacacacattgtgtgtgtgggggggggtcctggtacacttgtgtgagggtcctcaccaaattagagcccttgtttattgaatggggctcaagggtcagcacagctgaggggccccttgtccctctggtccccattgggtacagtccagcctgtccaaagggagtctccaggctcctgggtcaagttcctccgcagagactggcccatggagaggggcccatagcgtgggcccacccttacccagcatagtctgagctgggtgaggttgggtttgtacgtactaggatcgggatttttttgtcggttatctcccgattcccgggattaaacgattccggggcccccacccccaccccgcgcccgaactcagtggggggcgggacagggcgggcagtgggcaggccgtcacaggccacacccactccggt

SEQ ID NO: 52912 - DNA, 190 bp, Mus musculus
  source 1..190: mol_type = other DNA
ctctcgtggatagttttctatctgcacaatggaaataaaacaagggatggaaaattttagacctacttcctgaaggaagcagctaccggccgttacaaggaccagtggttaaagcgcttgtacgctgtgccataggtcaggaagtcccgccttcaggatcttcctacaggaccctggcagcatcctgagc

SEQ ID NO: 52913 - DNA, 434 bp, Mus musculus
  source 1..434: mol_type = other DNA
ggcgtgggtctccaggcctctcttgccctcccaggtaggctggggagcggggtgaggctctcccaggtgcaaggtcggcgcagaggccctggccagcaacctccctgctggcccagggcacctgcgccagggcagagatacgaaggatgtttctctcttggagtagagccaggcacagctctgcacctgcagagaagcgggaccccaggggccgatcccgttttctcattgtaaaatgtgaggtttggcaggcagaggccggggcttcagcactcagggtctggcaactgagactgagcgtagccaaggctaggcggggtgtgctcagaactgctgttctgagagaatatctctaaacctctatgagatagatgttgtggtaaaaaacagcttccacctggcctggagccaaggtcaggcactaggccagggcg

SEQ ID NO: 52914 - DNA, 206 bp, Mus musculus
  source 1..206: mol_type = other DNA
ttttgagacagtatctcatgtattcacttcaaatttcaaacttgagatgtagcaagatgactcttggacttacaggtgtgcacagccatgaccaccccagcactcctgagttcgaggccagcctggtctacaaagtgagtccaggacagccagggctatgcggcccacactagacggggtggggcctactagacagggcggtcgga

SEQ ID NO: 52915 - DNA, 243 bp, Mus musculus
  source 1..243: mol_type = other DNA
gtaggagcctccagtgctgcggccccagacacactggcttgtgccggaagctgtgagctgtcttctcactcccaggagagtcagggttaaataactcaacgtggtcttctggtgtgtctgaagacagcacagtgtacttacatataataaataaacaaatctttaaaaaaaaaagatataagtagccagacagggccagcctggttgtgcgccttggaagcctcaaagcagctgccctgcaca

SEQ ID NO: 52916 - DNA, 351 bp, Mus musculus
  source 1..351: mol_type = other DNA
aaagacaccctctcttcaaccctgaactgggtcagtggcagggctctgtctcctgcttcttagaccctaggagactgggagcctccagttgtttctcactcccaagagagtgtctcacagcactggctgctcttcctcagaacatacatgtggtgcacagatacatggtagttatgacattaagctcaaagaggttaaataatttgactagatctcacatgtaaataggaaataaataattttcatttagtcacaggagagtggaaataaaatctagacaggaacactgtcattgtgtgtgtgtgtgtgttgtgtgtgtgtgtgtgtgtgtgtgagagagagagagagaga

SEQ ID NO: 52917 - DNA, 355 bp, Mus musculus
  source 1..355: mol_type = other DNA
cagtggcagggctctgtctcctgcttcttagaccctaggagactgggagcctccagttgtttctcactcccaagagagtgtctcacagcactggctgctcttcctcagaacatacatgtggtgcacagatacatggtagttatgacattaagctcaaagaggttaaataatttgactagatctcacatgtaaataggaaataaataattttcatttagtcacaggagagtggaaataaaatctagacaggaacactgtcattgtgtgtgtgtgtgtgttgtgtgtgtgtgtgtgtgtgtgtgagagagagagagagagagtttaggagacagctgccccacccaccacctcttca

SEQ ID NO: 52918 - DNA, 409 bp, Mus musculus
  source 1..409: mol_type = other DNA
ctctgaacagtgcttgcctcctgccagaggacagctgagctcaaccaggacttccccaggacccccacggaggtctcagggaatggagcgttcagttacagtgtccttgaaggccatcacaaagaccaggcaaaacattttgcggttttgtgtgagctgtaagatttgaacctcatagatcacagctttaaatgaagaggactccttttccggtggcccccaaagtacagggctgctgtggcactgttgtctgccttatggacaccaggcagaagtcctttctgaggactgggagacatggttccaagtcaggaatctccccagagacccttgcaagtaaaactgtcccttttccgggggaaagctgcgaactttggctgcttggctcccagcccagataaatacagcc

SEQ ID NO: 52919 - DNA, 235 bp, Mus musculus
  source 1..235: mol_type = other DNA
agcaagcttcgttacccacttcattgtttaaatagacatgcttaacatggtaaattttacatcatgcgcactcacagaatctgtatgatctgagagctctgggccactggggctccacggagtttcatgagctcctgtagcacgaaacagggaggaggattccctccgtggtgacactctctgaggtcagcctgggctacatgaggccgatgttggctgacatgagtcaggctga

SEQ ID NO: 52920 - DNA, 276 bp, Mus musculus
  source 1..276: mol_type = other DNA
atgttcacagatgtacatacataccgggcagtggcggcccatgcctttaatttgaggccagcctggtctacagagtgagttccaggacagccagggctagagcatgtgacacacccctgtagttcccgcactccagcggtagagacaggaggatggtccaaagtccactatgctaggctgctcctgccagtgagctcccctgctcccagcagcaggcacatgatggtctccttgcaggagacaaggctgggcccccagggctcctgatcccctccc

SEQ ID NO: 52921 - DNA, 369 bp, Mus musculus
  source 1..369: mol_type = other DNA
ttttgtgcacccatataaggatggaagcagtaaggctggttctgagagccgggggtgtgcctaatatcacagtgggcgcccagaggcacctgatgactccgactgtgctccgacccagagctcttcctgtgcaagcgaagctggccggcttttccggacacgcctccgaggtctccgaggatctgcaaacgcctccgaggtttcagcagccactgccctcggaggctctacctgggcaggctccgtaccgccggcgtccgaggctttgcaagggcagtcccaggcctgtccgcctcataccgggctccgggaagccacgcctcttaggtccccgccccgcgctggagcttgcgcgctgcggcgttccct

SEQ ID NO: 52922 - DNA, 297 bp, Mus musculus
  source 1..297: mol_type = other DNA
tgaattaagaaaaacaagcaaaacgtttttgttctagagctgggttctgaagacaggagtccggctgcagtgtgtaactagagccagcctgtgacactcactgaccatccctggtctctgcattgctctaacagggctcggctagttcagcgtaattacaccagatcaggacgattccgctgtagtcctatagctggtgtcaactagatgggcaagctggactacatctcccctgtgcccgcgcacctttagtgggcgaggccgaggatgtgtgacgcacttcctgtgcgctcccca

SEQ ID NO: 52923 - DNA, 428 bp, Mus musculus
  source 1..428: mol_type = other DNA
tcattcagttttatgtaatgaaagttttacacaatacagagatgtcataacagaataaagactccagattcagtaaatgtgcacctatgggtggagaatcatacagatgaattttttttctctttttttttttttctcctaagacaaaaatctcattgtcctgagattcactctgtagaccaggctggcctcaaaccacagagatctgcctgcctctcttctcgaacttgtgtagtacgtactttacctgctgactcctatgatcaaatgagttgcacatgctgcagaaagctgtccagctccagagactcgggtcccacaagcgagtgtccccggcaggaggcgggagctgcagagctccgctaccggcttctctctccaacgtgttgagtcagcatccggggcggagcgcgatgccccttataagg

SEQ ID NO: 52924 - DNA, 322 bp, Mus musculus
  source 1..322: mol_type = other DNA
gtgagatctgatgccatgttacagctgcagtgtactcatttataataataaataaatctttaaaaaaattttttttaaatccctttattcttttcttgaaaagacaggctttagctgtcctggaactcactttgtagaccaggctggcctcgaactcagagccttcctttgtactttgagtgctgcaattaaaggtgataaacaccagacggactgggctgaactcagagatcacaaggagcacttattattataccatgtactgttggtagaggcctaacacaagaaaccgagtggtttgggcagtcttcctgtcaatata

SEQ ID NO: 52925 - DNA, 76 bp, Mus musculus
  source 1..76: mol_type = other DNA
ggccacagctgacctttccatctaccccagccagcgtgggagcctggccacctggatcagcgaggagccccagggt

SEQ ID NO: 52926 - DNA, 348 bp, Mus musculus
  source 1..348: mol_type = other DNA
aagagtgtgatgtgatgtgatcagttgtgggctcacacacttgggtgtgtgtaaattttttttatttttaaaaattatgaagtgtcagatctggctccagagttcaagccagttgtgagctacctggctgagttctgggaactggggcttgaagctcctcagatctctgacataaagaacacaaaagcgcagttttctggctatgttgcacatgctgcagaaagctgtccagctccagcacgcaagaacccagcactgtggccgactcgggtcacatgctagtgtctcgggcaggaggcgcagcatccggggcggcatccggggcggagcgcaatgccccttataagg

SEQ ID NO: 52927 - DNA, 497 bp, Mus musculus
  source 1..497: mol_type = other DNA
ctgcgccttgcagctgaactaaagggcccttcctgtagattggcaggcatgcctggcagggtctttaaaaccatccttggaaggctctaaatacaccgggtccctgactcctaagggaggcagttagaggctcctttggcttgatgctgggtgtggctccatgagccagccccgggtgtctcggcgtgtccaaatttgagacctctacctgggcatgtagctaagtaaccgtgaaatgccaacctaggcagcaattgagaacttccaaattctggctaactttggggtacaacatttcctctaacctgggcttaggtagcacacaggagggctgccctgacattcttggggtgtccagacgcctcttccccgtctgtcttggagaaggaaagcaggggccagccttgctgcgccgcgggcggggctgccccgaccctgccggggtggggaggaccagccgggcccaggaaaggggcggggcagctgcagtgacgcgg

SEQ ID NO: 52928 - DNA, 423 bp, Mus musculus
  source 1..423: mol_type = other DNA
cggggcagctgcagtgacgcggcggcagcaggggcgccggcgggcagaccggtcggggctatgggccggctccgcgcctccagagggtcgggctccatctggaaaccgaggccgggactgggggcggactcccaccttggggtcgaccacccctgccccggttgggtgaggggcgcccaccagaagctagaggtggacagagggcctctcgcctgcccgctgggtgcaaggctgtggcgccatgccgggacgcaggtgggcagagtgggcctcccagggcggaggccagagggataccagtggaccgctcctacaccaggtgcagacgcgaggatggccttgcggcgtgtcggctcgcgtccgccgctctggggggcccgcgtcagcgcgcggttgccatgacgacaggcaggcgggggaaaa

SEQ ID NO: 52929 - DNA, 385 bp, Mus musculus
  source 1..385: mol_type = other DNA
tactgtcttcatgtttcatgagaaaacggaaacctatttcctttagcatttgccaagggtcttgaccagggtcctgacttgacgcaattcttgatcgtcgttggctgccttggacccacctgccgttgccatgggaaacaggcctgaggcgcgcacatgcgcaagtgctcacactgtgggagccgtggccgaagtgtgttcggcggcccgccacacaccaccggagaaccgcggggaccagactggcccgctgccgaggccccgcctcttggacctcgggactaatcggattgaaagcgcgccggccccgggccccgaactcgccaattgaggacgactgtcaccgcccaatccggggtcggcagcggttgcgccctgcgggggc

SEQ ID NO: 52930 - DNA, 430 bp, Mus musculus
  source 1..430: mol_type = other DNA
actttctgcaagatgagtacagcagactacttagctcgcctgtaaggttgatagaaaacaaacccaagcatgttcttcagaaagctctaggactttttttttttaagatttatttatttatttattatataagtacactgtagctatcttcagacacaccaagtgggcatcagatctcattacagatggttgtgagccagaagagcagtcagtgcccttaactgaaaataatcttcctggttatttccttttttttcttaagacaagtgaatctagagtccagaatctagatgttataacttatgctaaagtatgttgaggccagcctggtctacaaagtgagttccaggacagccagggctaaatggagtggcacccgcccctaagcaggctcaggctccgcccccagtgccgcgttaaagccgtagca

SEQ ID NO: 52931 - DNA, 470 bp, Mus musculus
  source 1..470: mol_type = other DNA
gaggctctcagttcagggacccaatttggtatacaggcctctgggtcttacgtcctaaagaacgatgggcaaacacatcatgtgtggggacctccacttttagggtgattctcaaagcaggaggctccataggtcacgtgatctgactccccaaactcctcggagcagaggctccggagttagaattctccggggcccggcctggggttccgccctatcctggacaagagggtgagacgagcagggcttcgaagtgcagcggcccgaagcgggcgaccccgctggactcgggctcaggccccgcgtcctccagggtcgcatcatcgatgctaaactgggggccgggcggcgctcatggcccccgccggcctaggcgcccagcgccgccgccatttgagcccgccacggccccacagggcccgccctcacagggcccgccccgtctccctgggagcgaactcctcctctgc

SEQ ID NO: 52932 - DNA, 283 bp, Mus musculus
  source 1..283: mol_type = other DNA
atttcagacgtagcactttgacatatttaattcagttccaaacactcctgagcactgaagagatagaaagattgttttttaatcactttagcttctgaagagcctcagtgtccacggaaagcttagatcggtcctggtcacagccggggctgtcgctcaccaagggaacctctggggggcgccgcgagtcccgctacccgcgagactctgacattctgctgctcaggcctgcagaggaggagttcgctcccagggagacggggcgggccctgtgagggcgggc

SEQ ID NO: 52933 - DNA, 469 bp, Mus musculus
  source 1..469: mol_type = other DNA
ggaacccgtggtggcagccaccatgcccactatggcctcagagtctggattctcagggcctggcttacctgggaggtgcaggccaggtagaaggaacagggtgctgcccgcttgcccaaggtccagccaccagccagtcccacggtggagcttgccgcatggcactcagtgtcgatgtggccccatagggcttaagctgccatggagaccctttgctaggagctcctccagtccagggcagctctattagggactcaaagtgacaaaagtgcagctacactctgagataaatgcagcaatgtgtctccatttcacagatggggaaactgagacttgaatggctgagcttaagcatgagccctctgaagctgctgtgccctggcaccttagacccatctggtactgccaggccaccctggggcagagggcctagggggccataagcagctttctgggccctgagaagagg

SEQ ID NO: 52934 - DNA, 309 bp, Mus musculus
  source 1..309: mol_type = other DNA
tcctccagcctctgcaagtgcactgggcagggcttctccccatgcttctgaaactaagccagctggcctgaagccagccttgtccctcactggctgagcaagggcccataagtcctttgggcagcatcctgaggattcctcttcctgaggcctcagagccctggctagaggactggtccccagaactggctttctgggaccctgggtgaagggccctcacagtgctctgttgccatggagaagataacaggactcagtcctcttctcagggcccagaaagctgcttatggccccctaggccctctgccc

SEQ ID NO: 52935 - DNA, 213 bp, Mus musculus
  source 1..213: mol_type = other DNA
tacaaacagtgagaaatcccaagacattggaaataaagttgggctgaatcccagctgggaacaagatgtaagagattgcctttcacctcttcaatgcttgcacagatatctgtaagtttttctcgcacagtctgtacccgcggctccaagcaggaagcagcccagggcctggcgactaggccttgccccgtgggcgggacatcctaaagcccc

SEQ ID NO: 52936 - DNA, 333 bp, Mus musculus
  source 1..333: mol_type = other DNA
gagcacttctgtggccaggtcacaccaggcagttggctgctcagtgcctctgtggcaggtcacagccagtttgcacctctccacagcctggggctatattttcattccaaataaaatgctctggtagcccctgcataccagaatctcttgctaagcaagcctgaagacctgaattcaactcctggagcccacagtggaaagataaggctaaccagataccgcagagctaggagctcagagttccagacctgccaaagctacataatgtataggtcacagatcctgtggccccagcctcacctagagagagaagataactcctactagctactc

SEQ ID NO: 52937 - DNA, 366 bp, Mus musculus
  source 1..366: mol_type = other DNA
agttgctgccaacagcaggtacccggttcctgccctgccccatgggagccagggagtgggcagggtttgagccaacaccccagttcccagcattgctggtgtaacttgaagtcttaaggctgaaaggtcagataggaaccaggttgctctgatccctgttcccacaaaggtccaagtccctggatagagggagggcaggggctggcacccccagcactggtctgagttggggacactcagatgagctatgagtccgtcactgacatcagtgttcctaggaaaggatacaaagaattcagccgctgaggtccagaccttggatgtccggtaacaacctgttccaaatggtggctcagcctatctcct

SEQ ID NO: 52938 - DNA, 361 bp, Mus musculus
  source 1..361: mol_type = other DNA
ctgtaacttatatccatataaatgtcacctagcccaagatgttcttgagaacaggagcttcaggactcaaaccttagctctccagatcctgataaacactggcagactgcatgagagagagatgatggctgtaatcccacttacacaaatcaggtgtgtgggcttctgggagccctgctcctggatgttgaccctgccatgacaaggagtcctggctcaggaaggactgtagccaggggctcctgactaggactgacagctgcctggctgggagcagggtggagccagtgccccaggcaggcggctccagtaacatgctgggtcagagaggaggcggggctccgccccgggcatggccagg

SEQ ID NO: 52939 - DNA, 355 bp, Mus musculus
  source 1..355: mol_type = other DNA
cccaggttcagtaggtgggagggtatgtttgagatttttttttcttgaattataatcctaaatcatattcaggaaaagctatccagcatagaaatggacaggcttcgtttgggatcgaaccccagcagtcacttgctatattctattaaaatatctattctgaactatatgcatacatagaaaatgtcagacctgcagggtctgtgggaggttgtatggagtgtccctaatacagcagacacaagttttctttctgggcagctcacagcactaagaagggctgaggacttaaacgttttgactctgtgcgcgcggctcggggcgagagctggcacgactcccgagaggcagcgct

SEQ ID NO: 52940 - DNA, 395 bp, Mus musculus
  source 1..395: mol_type = other DNA
cgcctcccctggacgggaagctccgcagcccgagagggcctcgggcgagcgggcggggctggggtcggctccaccctggaggaatcgccctcccaccccagccctgcgtgggactgtggtatgcccctcgccataagtgatgtaatacgttctctagcatgtgcaaggcctgaggttccagctccggctccagtgcctgaaattcctgcactcaggagtctggacacaggaggatcagaagttcagggtcatctctaaaggataattattattggaaccataaattggttttacttggtaaaactgaaggtggcctgtcacagcatcctctggatgggaggagtagaggaaggggggagtccccccaccagggaggggcccccagcaagctgctg

SEQ ID NO: 52941 - DNA, 263 bp, Mus musculus
  source 1..263: mol_type = other DNA
ctccccggaggccctccccactacccacaggcccgcagggggatgggcaagggttgaccctgtctgggtaattggtaaaatgtacataaaccaaaccccgcgggtatgactcatcgctcttgaaggtggtggttgctgccacaacagaatccccagcccagattgagcgcggactatctttctggtccagagctcgatccttggtgcagctatgcccagtgcagcccagtggagctgcagagctctgcagggtgtgcagggct

SEQ ID NO: 52942 - DNA, 299 bp, Mus musculus
  source 1..299: mol_type = other DNA
ttcccgctgagtcacccgtgaagcctcagctgggccctggtgccctctcccctcctcagggggcaagctggttagcccagcccctggcgcccttgcttggaggccagcttgctggcatttgagagaatgggagtttgccgagggacgatgccctccctgccccctcccccaggaggcctagggtggtaccgtcgcagccttgcctcacctcaccaccccccccctcagtgttgtgggagggagaggagccccagaagccctcccttccctcctccccacccggggagggctttgtggtt

SEQ ID NO: 52943 - DNA, 478 bp, Mus musculus
  source 1..478: mol_type = other DNA
ctccatttctacagctagaaaataagaccacttctcacggggcaggagttcctggagattctgaaatttccctggatgctaccgccacccagcctgatgtttcaagtattttctaccagaatgaacctttaagcaagtctctggggaaggggctcagccctgtcctagtcacccctagggtggacctgaggggactattgcaaaaattccaaaaaggcctttttaagacccattgcctcccaggtggcgcatgcctctaattgtccaagtcttactgggtgcagcaagaagggttgaaagccttgaggtctgggctcacctgcgccacgcccttgaccacgcctctagcgcggtcggggcggggcaagctgaaccgagaccgcaggggcggggccgctgtcgctcggtaccagctctacgcgaccagactggtcatgagtcgggccctttaagggccgctcccgaggaggtgccaggc

SEQ ID NO: 52944 - DNA, 326 bp, Mus musculus
  source 1..326: mol_type = other DNA
tgacaggccaccttcagttttaccaagtaaaaccaatttatggttccaataataattatcctttagagatgaccctgaacttctgatcctcctgtgtccagactcctgagtgcaggaatttcaggcactggagccggagctggaacctcaggccttgcacatgctagagaacgtattacatcacttatggcgaggggcataccacagtcccacgcagggctggggtgggagggcgattcctccagggtggagccgaccccagccccgcccgctcgcccgaggccctctcgggctgcggagcttcccgtccaggggaggcgctagag

SEQ ID NO: 52945 - DNA, 313 bp, Mus musculus
  source 1..313: mol_type = other DNA
ctagttagttacacagtagctgttactaagagcacttctgcagcacacgggaagctagttagttacacagtagctgttactattgcaaaaaaactcttttgatatcgaaattattttctgctcatgatacacattcagaaaaaaacaatctgtcagcagcggccacagcaaccgcatgcctgggctgggtggacagtggctctgcatgagtttctccagcgtctcctggggccagactagtccaaactctctttggaagatctgatcccacagcgctctagtatgtcccaagggacccaagtggaccaatgtt

SEQ ID NO: 52946 - DNA, 281 bp, Mus musculus
  source 1..281: mol_type = other DNA
accagagtcagtttccatagcgtgcaccctggccgatcacccagccaggaagtccttgctgtcttccaggcatcaaggccagacagattccagaagctaagctggcagggatgatttcccatcccacccgccctggcccttgcccagggcctggggcgccccctgcgggcacgggtggagctgcagctatgccccgccctccctccgcccgcccccagcgcgcaggcctgcagtggttgccgtagctacgggaggcgagggtgtgcgaagcccgacgccac

SEQ ID NO: 52947 - DNA, 260 bp, Mus musculus
  source 1..260: mol_type = other DNA
gcattgtcacaatcaatcaactgatcagtcaatcgatcgatcaattaatgagttcggcgtggtttaatggactatgcctttaatccattcctggtctacatagtgagttacagactagccaaggctacacgcgttaggacccacagtccttgactcaggtaacaaaccaggactgagacccgtgtctcggacccgagcggtgcagcctctagggggcgctgtcgcctgcccgcccgcccgccgcccgcccggctcggccc

SEQ ID NO: 52948 - DNA, 448 bp, Mus musculus
  source 1..448: mol_type = other DNA
acagtgcagggtccccagactctaagaaactaaggatcatctgcattgattaaacattataccaagtggctcataatgtctgtaactctagttccagggatgcatgtctatgtctatacatgcagataaatcatactatataccataatatgaaccattcatgacatctgccatgtgccagagctagctctgagctcggtcctgcagtgacccacaagggcatgcccgggccactcctttctcatctggcctacaacatttggaggaggtccgcaaatagccctgggtgccctctggaggcgtaggtctccgctcacccctgcggcctcagcgactgcacgcagtaggtgggagaccggaccccaggagcgtccacccttgggcgggcgccgcacccccctgagctgggtgtcccccgccccccgggccgcctcctgtcccggccgcc

SEQ ID NO: 52949 - DNA, 344 bp, Mus musculus
  source 1..344: mol_type = other DNA
ctgagaaactgaggctggttagagtcgaagtatggcataatcagactcttcagagactagggtcacttactaacttgagctgggttctttcgaggcagctctcagcagacccgcacatggggggtgtccccagcgcagggccaaggatgagggcactcacctctgggaaggcccctttggcgaattgaccgagtgcccgctctgcggcgccccgcaacctgggacgcgttcatccctggctggcggacggcggtgcgcggagcagcaggcggtacgcggcgggctggctgcggcgggcgcggggctggcccggcgggacaggggcggccgggacaggaggcggc

SEQ ID NO: 52950 - DNA, 655 bp, Mus musculus
  source 1..655: mol_type = other DNA
gccccttcggagcggcgaggagtgggtgaggcgaaaccggttcgctgcacggacaggagctccccccgtgctaagggcggccaggccctgcagcggggggcgcaggggcctactccgggatggcgagcaggtgggcctcggccggccggcgcgtgagggagggcgcccggcgggagggcgcttctttccgtgcactccctgggtctgacaagacccgagcacagcacccggctctggcccgctcccatggcatgaccccgggggaccccgcgttgaagcggccaacggctgccctgacccaggccgtctggcccacgtttgtgtgacccgtctgaccacccagcggtcacaaccctccctagagtagtgggggagggagggcggctggcgcagctggccggcggtgggcggggtcaccgggtgtgcgcgcgcgcgcgcgtctagcgcgcgcggaggaggctcgcgactggcgcgcaggcgcaggcacccggtcgagccggcgacctgagaggaggcgggcataggccggccagagggcgtgccggggaaccgcgtcggcgtcgcggggcgcgggcgattcgaggccgacgcaatcggcgcgtgcgcgctccggcggtgtgtcccgcgtgcgcgttcacgtgtgtcccggagagcg

SEQ ID NO: 52951 - DNA, 374 bp, Mus musculus
  source 1..374: mol_type = other DNA
ctgccagactgcgcgggcagggaggggacctgtcccttgttcccggaagatcgcccacgcctggcactgtgccgagagcctaaatatctcctgaatgattcattcattccttggaagagaaagtatgtgattcttctccctctctcagactttgaagtcatttggcctaagggaatactgctggctgcgctgcttcttgagtccgttttacagagtgcgcccctggtgagcacagggttcccccccaggaccctcacgcgcttggggatctccgactagatcctcgcagcgctgctctgctccttggagtgagcgctgcaggcgagcgggcgggcgagcgcgagggagcgcgcggcgggctcctgggagcgtgc

SEQ ID NO: 52952 - DNA, 206 bp, Mus musculus
  source 1..206: mol_type = other DNA
aaggaggaaagcctgtggcagccagttctctccaccaggtgaatcccaaggatcaaactcaggttgtcttttgagacagtgtgtcccactgggtcaggagacagggactgcaagtcccagagagtttcctgtctctcccaggtctgggatgacagatgcatataaggatcccgagctggaagccagcctgcgccccatcatatgag

SEQ ID NO: 52953 - DNA, 388 bp, Mus musculus
  source 1..388: mol_type = other DNA
actttcagcagccccctggcaagatctacacagttagtaagcaattattgtttaacgcgatgttctcataattcctgattgtcctgtcaggaaatggtagctacactgaaccttctagaaagaaaacctttaaggttccgagcggcccagctttgccgatcaggaacctgagctcagagacgtgaagctgctgctccaagaccccaggtggtaccggcgctctctgcttcaccacttccgcctattgcgggccctggccgcgccagacggcccacgtgcttcccgcctcttcagggccagtcatccaatctttggaggggttgggctgtctccaccaatggaaggagccaggctgcagcgttgcgcggagaccgcagctgttccctgt

SEQ ID NO: 52954 - DNA, 513 bp, Mus musculus
  source 1..513: mol_type = other DNA
cttgtccagaggcatcctctgcagaacttgcatctgctcatttgctgggacctcacctgagcccgtggctacctgccaggggcaaagagaataaactatttgcttattgaatgggaatggcctgagcttgcagtcccagcatgaaaatctgaggccaatattctcaactatacagtgaaaccctgtttccttcttacactgttcaacgaaacaagactttaatgttgtcttacccttgacctcttgaactcaaggtctgtcaaaatttgaactattcttcaaaactagtgctattttaatatgatgatgatgttattaattataaaagccaacatgtgtctttgcgtacaaagcacaaagtcatacaagtagaaatggcatggctggaacttttggcatagatctctatgtaaagcagtactcagtaaatgttttattgaagtaaatgtcctaaacattctgtttcattttgacataatctattatgacaactggtttctgtagacaagtgag

SEQ ID NO: 52955 - DNA, 293 bp, Mus musculus
  source 1..293: mol_type = other DNA
agccagacggtgtcccttcagcactcaggacatctgtggggccctaaggggacccagtgggtccacagctgtcctgcggctggagcctcctgtgaccctccatcatgcctggcacagtccctaccaagcagcctgtgaacttcaagtggcaaaagtctgcagctgctttctcgcctctctggcccggccctcctaggcagccagtggcccatgatggcctcaggaggcggcgccccttcccctgattgccttggctacagcccaggcctccagcagtctagtgctggagaact

SEQ ID NO: 52956 - DNA, 442 bp, Mus musculus
  source 1..442: mol_type = other DNA
cagctggggtgtcccagcaatggcttccagctgcaaggacttggcccctcaagcgaaaagcgcttctgtagttaagtaacttgctcaaggccacccacgcactccttagagtcaggtatggagggagactacactcccgaggaggcggcccctctggaagagcgcacagcttcaaacagcgtgccacagccagcctgctgtccagccggaggcggaggccggttggctggggagcgcccgaggggcgcggtggggcggggcacgacgccagtcccctggccaagccctcaggccccacccgcagaagccctgttgggggcgccaccccagcccgcacccccccccccaaagggcccgggcctgtgggggattcttccccagtaacagtgcgggtttgcacccggccctgcccgtgggtgcggggaagagacatgtgacaaag

SEQ ID NO: 52957 - DNA, 393 bp, Mus musculus
  source 1..393: mol_type = other DNA
ctgctgggaagctccctggcagtagggggccaggaaccagctggggtgtcccagcaatggcttccagctgcaaggacttggcccctcaagcgaaaagcgcttctgtagttaagtaacttgctcaaggccacccacgcactccttagagtcaggtatggagggagactacactcccgaggaggcggcccctctggaagagcgcacagcttcaaacagcgtgccacagccagcctgctgtccagccggaggcggaggccggttggctggggagcgcccgaggggcgcggtggggcggggcacgacgccagtcccctggccaagccctcaggccccacccgcagaagccctgttgggggcgccaccccagcccgcacccccccccccaaagggccc

SEQ ID NO: 52958 - DNA, 428 bp, Mus musculus
  source 1..428: mol_type = other DNA
agaacaagatgatcactttaaggctagcctgggtttcaagagagtctgtctgaactaactgcctaattgcccgaagcaaagcttaggtcgggagagttaatttagaacgatacccctgccccaacaatctctgtagcattggcacaaatcttcggggcgaccgcgagctcaccgaggtctccacggcagggcccaggcggcagaggcagctagccctgcgggcggcctggaggtaccgcagcgagagcagggcgggtgcgggcctgagctaccaccgccgggtcctcacctcccgcaggacttgtggctacaggaggcaatctgtccgagtggctgaatccgggacacaggttgtcaggggaggggcgcccgggggacccgacaactcgcgccgccgcctgacgtcacctacgccgtcgcgtcactgc

SEQ ID NO: 52959 - DNA, 429 bp, Mus musculus
  source 1..429: mol_type = other DNA
catgacgagtcctgaacatcctgactactccggctctggggtcaggagaaaattcttggctggcctggaattcccatcataagtgactttttaaaaatcataaacaccctgaaatactctcagatctgattagcagttataaaacaatgcaactgtttggtggtggtgttttgttttactttacagattttttaaaactacattgaacacagtgatcttactctgtgaaaatcatacctgaaaagtagtgtgattacatttagatatgcataccaaaatggtaaaatttagttaacgataaagctattttaataccctaagctcaataattcactgaaagaacattctttttgtgatgaaagtacaaaaatccatcttttttttccctgagcttagttagctctccaatctggtgtcacatgacattgt

SEQ ID NO: 52960 - DNA, 454 bp, Mus musculus
  source 1..454: mol_type = other DNA
gaattgttttgacaacaatggggatggtctaacaaccatgggatccaccaagctggtaccctgcttgccaccaggaggtgcgcaacagagagtctggagcctgacaattgcctgtgcctcaggtgggacggatgcggaaccccacgtatattcatgaataaacatgacaaagtatagtttggatagagaaatgcctccctcagacctaacctagacaacactattgcagtgaaaattaaattgttttacccttcctacccaaacaaggggacccactcccaaggcggtgattggctagcccgggctgggggcgggctgaccttcgctccgcagtgccgtcaccacatgaccccgcccccgcacggggggcggacagttgtgtgcggccgcaggattggtcgccccgctcctgcgagggggaggggaggcaggcagcgcgcactcgcgcgtgcgt

SEQ ID NO: 52961 - DNA, 252 bp, Mus musculus
  source 1..252: mol_type = other DNA
ccaccagtatgggtacgccaccagtatgggtacttgtacatggcatgttctaggtccatttctcaaaatacacagaagagtgagagagagtgtctatcaaactaattatttcggttctagctcacctgaaaccataacttacgaatcagaagacactagtggtaaataatggccactcagttaagaaaagattaagtattagaaacatttattttttttttttcaaaaaaaaattgggaggagtggaataaa

SEQ ID NO: 52962 - DNA, 392 bp, Mus musculus
  source 1..392: mol_type = other DNA
tttctggaaaagcagcaagctctcttacttttaaagacagggtctaccaggctggcaggatgtttatggaacataatactgtgataaacttcatgcatacaataaatggtcatcatcgtaattctcgaaattccagttgagacagacagacgctcaatatttcgggggccaatcccagactaaaaggggtttgtcctggcgcggccttaccgcagacgctgaggctgccatcacaacacccagggtttggctgcggcagccctaaagaacaaagttttccttggggccccgccgggacgccacaccctggccggaggtagctcttctgactaggcctctgcggactcggccggagcgcgcttccccggggctccaggccccgcctgcgcggc

SEQ ID NO: 52963 - DNA, 385 bp, Mus musculus
  source 1..385: mol_type = other DNA
agctgctgtctactcttcagctgggggatggatttcaactcttccactggaagcacggcatgtggtctaagccagtgctggcaatttgactatgcctccctgggcgtctgtgcaatccctggcaaggtttacaagacccttctagaggtcggggtcaccagcaggtgcagagctgctcactactgatcagcacgtaggactcgagccgctgccgcagctttcagctcttctagaataacctcgcccgctgcttgctagccgcttggacacttggcggcacagcggcccaacttaggagcaaccggtggcctgcgcagccggtagagaggcctcagcctagggagcgcacgcgccaaggaggtggagctaagggcggcctccgaga

SEQ ID NO: 52964 - DNA, 239 bp, Mus musculus
  source 1..239: mol_type = other DNA
tctccgatacaaaaccaatggatttttgtatccaagcatgggaatgcatcttggtttatgattcaatttgttattcatgaacttcatattactgaccgtctggtggcttttcctgcgtaagatagaaaagggcgtagatcccgtggtccacgtgcctcgcgtaagcgagcgcgcaagcgccaggaatcggtgcccattggccgccccggcgttctccaacgttggaactctctgtggcc

SEQ ID NO: 52965 - DNA, 233 bp, Mus musculus
  source 1..233: mol_type = other DNA
catgctgttcagcagctggacaggcagtttgtactagaagaaagctctggctaggcaaagcttgaggcctatactctaggctctgcatcttgcaacccccctcccgtgaggggctgtcactgcctaggccgcaccgaaccggtagggtgggcggagtctcggaggccgcccttagctccacctccttggcgcgtgcgctccctaggctgaggcctctctaccggctgcgcagg

SEQ ID NO: 52966 - DNA, 443 bp, Mus musculus
  source 1..443: mol_type = other DNA
gggggtggcccaggccccagcaccatcacgtaggccagctccaggaccacgacggcggcccacagcgcggtgagtaccagtggcatccgcgcgggcgctccttctgcgccccgagctgcccaggactcccccatggtcggacccaccggctttccgatcgctgggatcccactgcttccgcattggggagcgcgagatgttcgaaaatctgattagcgtactgcagtagccgcccctggtgtggcttgctgccactccatgaggattgagttgcagcccccggggcgtcggggttacttgttgacttgctgttacagactgtgaaatagaaataggggtctgtttctcgaaggggcagcctttaggatgcctacagccaccacttggaatccacttttagtacgaacccgatctgggggctggaccgggccctacttaacccg

SEQ ID NO: 52967 - DNA, 321 bp, Mus musculus
  source 1..321: mol_type = other DNA
aggccgggtccaacagcaagtcgcggtcgaagggcccctccttggggcgagctcctgcacactcaggccgggttaagtagggcccggtccagcccccagatcgggttcgtactaaaagtggattccaagtggtggctgtaggcatcctaaaggctgccccttcgagaaacagacccctatttctatttcacagtctgtaacagcaagtcaacaagtaaccccgacgccccgggggctgcaactcaatcctcatggagtggcagcaagccacaccaggggcggctactgcagtacgctaatcagattttcgaacatctcgcg

SEQ ID NO: 52968 - DNA, 250 bp, Mus musculus
  source 1..250: mol_type = other DNA
acctcagggaaggtggcaattctgagaagtgactgttctagacccggcaggtggcatgtgacagtattacttttatagccagaaaaataaatatccaatccacaataagattttgaatatcatttccaaaggaatgcacaaagtgggtgctgagcagtccagggtcctctgcaagagcagcaagcactcttgtactttcaaatgttaaaccagtgcttatttggtcccagccgggacaattttaccccgg

SEQ ID NO: 52969 - DNA, 302 bp, Mus musculus
  source 1..302: mol_type = other DNA
agctatctaaagtcacacagctggagtgcttaccacatctggtcagcaagtacttgcaagagccatgggtcagctgccctcaagaaagtgccagctactctgggtggtggatgggactactttctctttgtaagagcaggctcccagctacatgtgtggaggctcccgatgtataggaacggggaccttcagtcccctctgtcggtacccgacagcgccacgcggggtactgccaaggcctcgcggtccttgcaaggcaggcaccacccgtagcgcttgaactgtcttcggttcttctactg

SEQ ID NO: 52970 - DNA, 243 bp, Mus musculus
  source 1..243: mol_type = other DNA
actcatatacatgaaaatagatttaatataaaaaaaataatgagtcttcctttgaggctttctggacaccaatagacagatctgcactcgagacaaccgcagtggctttccttctctgtaattccgagatttccccactccggtctgtagacaacctctttggcttccgactacagccaggcttaagccgcaggaggcggagcctcggggtaagggggcgtggaggtttgtgtgcacatccct

SEQ ID NO: 52971 - DNA, 227 bp, Mus musculus
  source 1..227: mol_type = other DNA
tctgtgagtcaaagagtcctaccaaggccagcatttcaaaagcgcggggaagagcttttccctttgtataaatagcggtaaatagctgtcacaacaattctgaaaggtacctataatattcgcggtgtcaaagattttcataggtaatttgtctagctatgaatcaggttcatagccatttgaaaccatataggttctagttcaattaattcttaaattccgtaatt

SEQ ID NO: 52972 - DNA, 255 bp, Mus musculus
  source 1..255: mol_type = other DNA
gctgccgccgccgcagccgccggaggattggagctgggattcccccggccccgcccccgccccccagcccgccggagagactggggctcgcaagagggtcctcaccaggccctgggtctggactttcaaatttcgacccctgcctggcagatggcggcaaattggcagagtatgttgatagcagccttcgacgtcacgggatgacgtcggaagtctgggagggaggaggagcaccccccctccccagccagtggc

SEQ ID NO: 52973 - DNA, 363 bp, Mus musculus
  source 1..363: mol_type = other DNA
cacatttatataaccttgtatatatatacttttatatattcatatttatttgtatttattacttagaagcacgtgataaatatatttcttctgtatagtcctgaatatatcctggaactcactctgtggaccagactggcctcggactcagaacgccgggagggggccgaacgtcacctgggccacgattccctccagatggacccaggtaccgtaggagggctagtgcctcgacctctgggggaactccctcggagcaccgcgctgggttagagcttagagggctccaaaccttagaccaccagcgaggcggagtctggagagcgggcgtccgggggaggggagcaatggctctttgttccc

SEQ ID NO: 52974 - DNA, 398 bp, Mus musculus
  source 1..398: mol_type = other DNA
tgtcttcagtatacactgtttcaatgcatgcgatggaccaaggactgtgtatgatttaaataatcacacccctgcaggtgttttcacttcgcgaatgtagaaagggattcgaacccacgcgtgacaatggattagcagtccatcagaagaagaaataataacaaagagttttttaaatttcctctagccagcgagcgtgcgtccagttccccggggagagaaaccggtccaggggtcctcggccgcgcgccgagaccgcggctaggttcagcgtttgcaaagcgcgcgccgaggaaccactgctgcagtagctcctcctctctcacagagggcgagctggcacgcgcctccatggaggcgagcggaggagctgcgcgtagggctcggctggcctcggc

SEQ ID NO: 52975 - DNA, 399 bp, Mus musculus
  source 1..399: mol_type = other DNA
taagatcctttaccgccagttcaaacaggagttgaaggcccccaccgatgctgagtccttgtcttccatggtctgagaattgagattacttctctgagcctccgttacgccgtctgtaaaaagggagtgtaaacatcctgtaaacttcgtacaaatgtgaagtattattaatattgctacagtgttattatgatattgttactattaaccatgcctccgccctccgagatccctgaaggaggaaatgacattatgtaaataaacgaatgtcacacccacagctggctctgtgccggagcaccgtgttagacggcggtggacccaaggacccgtcgccgtatcccggcatgcctggacaccagtggttccattgtaagcgccacaaatgggcgcctcctg

SEQ ID NO: 52976 - DNA, 370 bp, Mus musculus
  source 1..370: mol_type = other DNA
agattccaaagactggacctaagacagactttgctggggtccctacatgcctggaggccaggtcatgtctgcacctgccccagacactcggcagattggcaaggcaggctagctagcagggcctgtgtgtgggaggcagctagcagcagcaccaagtgctgtcgacctcccctctggttaacagtgagtgtcataagcaaagagcttagtttccatggagacacagcattttgcaaggctggagaacccctccctcccccactgcctagtgtgaggaggctgcaggaggttcccttagccactggcatggagggcttctctgccattcaagactgtccttcaggtactcaccgccaggaatgtgcacgcc

SEQ ID NO: 52977 - DNA, 483 bp, Mus musculus
  source 1..483: mol_type = other DNA
tagcagccgtgctcaccctgagcagagctcagtctccacagagcccagacctgcagcagaagcctggagaggcatttcctgttagggggcagcctcctcccgctctaagcccaggttcccagggcccctgactgagccagggtaaggagagagcaggccttggcctcctcccccctccacgcaggcggggcctcaatgctcttgccaggcttggaaggagctcagcagccagtatactgatactggtgaatccagatcccggctttcgggagtctctctggaagacagcttcaccccagctgccttagctgcaaacaacgctgattctcagacagacacactgcttcctgctccagcagcccccggggagctagcaggggagctggcagcggccccagcccactccttacaaggcgtgagtccgccgggcccgcccccggccctcccgccagaggccttgatccctccccctgtcaagagcag

SEQ ID NO: 52978 - DNA, 318 bp, Mus musculus
  source 1..318: mol_type = other DNA
tgtgggcactgcttgtatgtggtgtacagacaaacatacataaaataaaatagtaattttaaaagagctctgagggtgtcccatgcagggcatcattcccatttctcagatagaaaggctcctggtgccctggctccagcccaccagccttgtctttcccttctgggtattaactgtcaacaagcaaaaggactcgcccaaggtcgcaagcgcgagcgtgtgcccgcggtgccaggcgcggccagcggcgccaccggtgctgcgggggcggggtcagcggagggcggggcgccgggcaccgcggccgccaacgccgcc

SEQ ID NO: 52979 - DNA, 240 bp, Mus musculus
  source 1..240: mol_type = other DNA
ctgtgaagagctgtctccaacaggactggtgatgactcaggagaccttcaggagacaaggcccagtacagattcctgtccagcagaggccctcggggatgagcccagcggcggactctacagcagggctcagggccgcgctgtcactctcccgcggcgcaaggagcgtcaagcgcctcttggcgcagacgcggaactaagttacaactccttctcacctattggctggtaggcaaattag

SEQ ID NO: 52980 - DNA, 275 bp, Mus musculus
  source 1..275: mol_type = other DNA
tgcccctctgggagggagcctcttctcccaggttccctgacatataatttccactggcccttggataagccaagggtttttgcgggatgtccccaagggcccagcattctgtcagagggaggctggcaggatggcttgaagccagatgccagactggaacgggcttccagggaggctggcggaggggcgctctgagtctcagccccgcccgaggccgctgcacggcggccccgcccccggctccgccccgccggcttcgcgggctggagagcgag

SEQ ID NO: 52981 - DNA, 371 bp, Mus musculus
  source 1..371: mol_type = other DNA
cccaggcatggcctgaccccaccctgggcacagccccttcctcccacacagtaggaggggctaccccatttgttgggtaagggtagaaataaagacgatttgatggtttttcatatatgtaatactagtgatcatataatcctaaggctgcagtgtccattccacgaagaacactgaataagtcaaaatttaccttttagttaaacttgcattaccccagaaggccgttcgcgggtggcttctggagagtgcacgttccctgagttgcgcctgcgcagcagtggcaagtcgaatatccaaggcagcgcggcgcaacccgagtcggaaggatttgcgcctgcgcggcgcgggcggggcctctagggcggagt

SEQ ID NO: 52982 - DNA, 363 bp, Mus musculus
  source 1..363: mol_type = other DNA
aaacacagtgaccaattatttggtgcactcttcatccgcagagcccatgaaggagtgctgcttctgggcttttgtgtcaagttgacataaaactatctagcaagttggtgaagaggtgggtaatggcaacacccacctcactaagtcaatgccttgacagtcaatcaatgtggaccgactcgctctggaatctgaggaggtcggccttcttgcttcactctggtccggggtcggagctccgcagagcgcacagacctggaagctctggtccgagggggcgagtccagccacgcccctctgcgtcccgtctgggctggccccaccccgaagccggccaggcctgcggggcccctttaaggcagc

SEQ ID NO: 52983 - DNA, 569 bp, Mus musculus
  source 1..569: mol_type = other DNA
accttgtggcagaaaggcccttctcaattgttccagagttctgagaagttttttgaaaaactagactaggacaggattccataacatttgctcaagtactgggaaagcaccgaggcactctgggacttttgtgttggaccaccttagctcaactggcagctggaacttaagctccttaggtggtggccggctacctactgcttcttttgcagaagtgggcgaaatgcagatcccaggggctgagcgcgctctcgtacagtcttctccggtccgggaccgcgccccggaaaacccgggtttccgctggcggggtagcagccgcccgaggaggaggggcgcggagcctgcacgccgaggcctgctagggactccagggccgcgccgcgagagcgcgcgggctgtagccccttcccgggggccgcggggccgagcgcgagtctggccccgcccctcggcgccggtctgggtggggccgcggctccccgcccctttcggacacgcccacccagtgtctgggcctcgcgggccgcaacaggcggcggcgggcgagcgcgaggaccgcgcgcagc

SEQ ID NO: 52984 - DNA, 348 bp, Mus musculus
  source 1..348: mol_type = other DNA
ccacatatggacacatttgtcttaaacaacaacgttcgattcacaaaagtgtaactccagttccagatctgacacttctggcttctacagataccaggcatggtggaaaatgtattaatgaacattctttttccagctggaacccagcccattcaagcacgcctgggcgggagtgagcagaccatcactttggccaggagagaagaagaatgcatctgctgccaggcagcggatgtattactactgctgcatacgttcgtcctctagatggcgcatccgcatggcggcgattcctattccccggtaagggaaagggcgtgtttggaccaagtctccaatcaggcccgg

SEQ ID NO: 52985 - DNA, 398 bp, Mus musculus
  source 1..398: mol_type = other DNA
tgcctctgaagtcaggcctgttaaagtaccagagttgggtggttaacctcaactgtggtctcatggcatctaatgtggctgtagggggtgccactattagacacccaccaggagctctttcaattagagctgctacaaggaaaccatttcagtgctgagaagtggcaggactcttgactcctgttgcctcttgactccaagatggaatgagtttctgactccgctctggtcagaactgagaacgctggagtcctgaccaggcctgggaggttacaagattgcaaggaaagatacctgtatctaaagcagcagcaggcaagctacgcagtccccctccggcccccgcccccgccccgcccccggtgtgagatgggggacgggcggcgggtatagctgag

SEQ ID NO: 52986 - DNA, 353 bp, Mus musculus
  source 1..353: mol_type = other DNA
tcaaagtcatcctgagctatgaaatcaaccgggtccaccatggctgtgagggacagtagtgccggcttgagtagtaaggactcctacccacccatttatttttcagaagaagaaatgcaggctgggagttataatttctctaataatcccagcactgatttctgagttcgagaccagtctggtctacaaaaaaatgatagcagtaagaatgtaaccatataattgcttttgttctctccctcctgggagataggaatgataggccagcagtaggtaggggaggtgcacccgcctccaggcacctgcaagctggtccaggcttgctaaggaaacaagcaggcgttggggcccgc

SEQ ID NO: 52987 - DNA, 350 bp, Mus musculus
  source 1..350: mol_type = other DNA
ctgagacgcctgagtcctatctcagtcctgttaggacggcgacgcctccccctcccaggccgatcggtcatcaggcacggagcgaccgacgcggcgcccagcacgagagctgccggcgacagtagctcgtccacgacgcgcctcgacagcgtgcaggtggccccgacggtaacgccggtctggacgctcgctcccgtctgccggtctgaggtgacagacctgaggcgggaattgcgattccggggcgctcagaggtcctccggatttccctccatcaagtgaggcaagcctaagcctcggaggtctcgatcccaaacagcgacccccgtgggcgccgcggctggcgattg

SEQ ID NO: 52988 - DNA, 340 bp, Mus musculus
  source 1..340: mol_type = other DNA
ggctattcggaaatttccactttccgtgggtccatatgcactagctggtggcacgcggctctcgccagcctcgccgcgggctgccggcctcaggtcccgcaggccccgccctgaggccccgccccgctccgagcgccccgccccctccacgcgccgccaccgcgcatcgcccctcccgcagactcgggctgccccgctgcaaaggcgcgcctccgcgatggattcccctccctcccgcctctgcgcgccgccaccgcacgccagccggagcaccacgctcaccggaggctccggctctggtaacaatcgccagccgcggcgcccacgggggtcgctgttt

SEQ ID NO: 52989 - DNA, 312 bp, Mus musculus
  source 1..312: mol_type = other DNA
acttgccaggtgctggtgtatatctttattcggagaggtaggcagaaatttgttgagtcctgggccaacctgaggctgagacgcctgagtcctatctcagtcctgttaggacggcgacgcctccccctcccaggccgatcggtcatcaggcacggagcgaccgacgcggcgcccagcacgagagctgccggcgacagtagctcgtccacgacgcgcctcgacagcgtgcaggtggccccgacggtaacgccggtctggacgctcgctcccgtctgccggtctgaggtgacagacctgaggcgggaattgcga

SEQ ID NO: 52990 - DNA, 297 bp, Mus musculus
  source 1..297: mol_type = other DNA
aatcccagcctgggctacatagttagcctggagtggccatgcacactaatcccagcacctgggaggcagaggcaggtctgagttcgaggccagcctggtctaggacagtcactggaagatggcgcgagagggtggacggcgcagtctctacaggtgcgcgtgcgcagagaccagtagctggcaggcgggaccgcgcaccctcaatcagtccctcccgtgagcctttggaggttcccaggcaggccccggaaacagcccctcttagtttccggcaacaggaacggggcggtcgcgcga

SEQ ID NO: 52991 - DNA, 421 bp, Mus musculus
  source 1..421: mol_type = other DNA
ggctattcggaaatttccactttccgtgggtccatatgcactagctggtggcacgcggctctcgccagcctcgccgcgggctgccggcctcaggtcccgcaggccccgccctgaggccccgccccgctccgagcgccccgccccctccacgcgccgccaccgcgcatcgcccctcccgcagactcgggctgccccgctgcaaaggcgcgcctccgcgatggattcccctccctcccgcctctgcgcgccgccaccgcacgccagccggagcaccacgctcaccggaggctccggctctggtaacaatcgccagccgcggcgcccacgggggtcgctgtttgggatcgagacctccgaggcttaggcttgcctcacttgatggagggaaatccggaggacctctgagcgccccggaatcgca

SEQ ID NO: 52992 - DNA, 262 bp, Mus musculus
  source 1..262: mol_type = other DNA
tggagcaaggcttcttgcatcccaggcacgcaccctgcctcctgaaacgtgctcccggtgcaagggtagatttcttacttttacacttatgacatcagtttggaaacagctggtatcctgctgagagagccagagctccggcgcgccaaagcgcagagcgcgctctattgtttacatctttaggagccagagcgccgggcgcgcagtaaggaggagttatcctgcccacgtaaaatacccttggcacatgcgcagattattt

SEQ ID NO: 52993 - DNA, 455 bp, Mus musculus
  source 1..455: mol_type = other DNA
tcccagcactctgcaggcccaggcctgagtcactctcagccccatggagagctgaggccgtcttgctgggagaaatgacatttcaacgggaagactattcctaggtgaattggtcggtccatacgaacccaggctgctaggcattaacctagctgttagagatctagccctttctcaaagacagcttgctgttccaggctgtgcgctgagccctcagggctcgggagtcctggggcactggctgtcagctgggaggcagtgaggcagtggtgagttccaggacagcctgggctacacagagaaactctgtgagaggtctcaggcggctgctccataaagcctggcttctgtgacaaacgccatttgtttcccaggacttgggctctcagagacctgatcccggacggacatccttttatcaccaggaacctgctccgggcctgggaacagcagca

SEQ ID NO: 52994 - DNA, 535 bp, Mus musculus
  source 1..535: mol_type = other DNA
caccgtgaaacaccgaggctctgagccccagagagggcagcggcccatcagggggaccaggcctgcgcgaggaccaggctccagccttcgggcccggctccgttcctgcccgggatctgctgcgccgccgccgccgccgccgccacccccgccgcgccccgcccctgccacggccgccgccgccgccgccatcttaggggcgggcagcgtccaggggcggagccggcgcgagaatcccgtgggcgtggcgggcgagcccggggaaggacgcgcaccgccccagaggatccgaagcccagcgctcgagtttggggagctcccgggggggggggaccgcggcgggccggcggcggacaggcccggggccgggaggctgcgggcggcggcgctgggcccggcgcaacgagaggccccgagcgccggtgagcacgtggcccggatgggccccggcaggcagggctcccgggaggcttgggcccaggtcctgctggtggggggggcgggtgcctttaggtgttcacggcctgacgccccg

SEQ ID NO: 52995 - DNA, 484 bp, Mus musculus
  source 1..484: mol_type = other DNA
ggagtagctatagttagtactactttcactgcttatgcccaaggtcatgcccggctacaccaccggactagagtcctgcaaggtagcgcggcgctgcaatataatgcgccaacctcagaggatggctgtagagggccaggcctcccccggtgaacgattgggggcaccgtgaaacaccgaggctctgagccccagagagggcagcggcccatcagggggaccaggcctgcgcgaggaccaggctccagccttcgggcccggctccgttcctgcccgggatctgctgcgccgccgccgccgccgccgccacccccgccgcgccccgcccctgccacggccgccgccgccgccgccatcttaggggcgggcagcgtccaggggcggagccggcgcgagaatcccgtgggcgtggcgggcgagcccggggaaggacgcgcaccgccccagaggatccgaagcccagcgctcgagtttggggagctcc

SEQ ID NO: 52996 - DNA, 493 bp, Mus musculus
  source 1..493: mol_type = other DNA
gtgccaggcactgcagtaaactgtggccctgggcaagacataatgtctgtgcctcagttggagtagctatagttagtactactttcactgcttatgcccaaggtcatgcccggctacaccaccggactagagtcctgcaaggtagcgcggcgctgcaatataatgcgccaacctcagaggatggctgtagagggccaggcctcccccggtgaacgattgggggcaccgtgaaacaccgaggctctgagccccagagagggcagcggcccatcagggggaccaggcctgcgcgaggaccaggctccagccttcgggcccggctccgttcctgcccgggatctgctgcgccgccgccgccgccgccgccacccccgccgcgccccgcccctgccacggccgccgccgccgccgccatcttaggggcgggcagcgtccaggggcggagccggcgcgagaatcccgtgggcgtggcgggcgagcccggggaaggacg

SEQ ID NO: 52997 - DNA, 386 bp, Mus musculus
  source 1..386: mol_type = other DNA
actggaggagtgcctccagtcagaccttcagtcaagaagccttactgactgtgtcgggtacactaaatgccacttcacgtagtattcaaatataacaacatttcataaccctggtttgtcaataacctttcagtttcaaaaacctttttgtaatgtctgccctccacttgagaagtgaaagcagcttctcaccccacttgagaggagcggtcttaagtcaggactgcagactaatgattctctccaggtaaataatgatgatgataataataacccatatttataattcatggcgcgaggccaggcggcccaggtgcgtcagggggaatcctcggtgcacctgggcgcggcaagagaggggggcgtggccgccgcggatgctaggg

SEQ ID NO: 52998 - DNA, 379 bp, Mus musculus
  source 1..379: mol_type = other DNA
gtacactaaatgccacttcacgtagtattcaaatataacaacatttcataaccctggtttgtcaataacctttcagtttcaaaaacctttttgtaatgtctgccctccacttgagaagtgaaagcagcttctcaccccacttgagaggagcggtcttaagtcaggactgcagactaatgattctctccaggtaaataatgatgatgataataataacccatatttataattcatggcgcgaggccaggcggcccaggtgcgtcagggggaatcctcggtgcacctgggcgcggcaagagaggggggcgtggccgccgcggatgctaggggagcggaccggtccacagaggttcatctggagaggtgggtcccgcaacac

SEQ ID NO: 52999 - DNA, 208 bp, Mus musculus
  source 1..208: mol_type = other DNA
cctcaggtattgggaaatattttggggatctacatcctttttttatggtccaagaataaaccagggccttcttgcatatgctcaacgtcaagacagggtacacaacaaaggtttattaaacaaacaaatcctttggatggcccatcctgcaggcaggaaacggtccctgggatttctcaaaaagtgctcgagggatttacatcacgag

SEQ ID NO: 53000 - DNA, 459 bp, Mus musculus
  source 1..459: mol_type = other DNA
ccttcttcaacagggactccaggaagggggagtgccgcagtcccgccccacggatgatgagggctcgaaaggaagaggacagagctcgtctcttgcgtccctaacacgggggacagagggaacggggcgtcaggccgtgaacacctaaaggcacccgccccccccaccagcaggacctgggcccaagcctcccgggagccctgcctgccggggcccatccgggccacgtgctcaccggcgctcggggcctctcgttgcgccgggcccagcgccgccgcccgcagcctcccggccccgggcctgtccgccgccggcccgccgcggtcccccccccccgggagctccccaaactcgagcgctgggcttcggatcctctggggcggtgcgcgtccttccccgggctcgcccgccacgcccacgggattctcgcgccggctccgcccctggacgctgcccgcc

SEQ ID NO: 53001 - DNA, 315 bp, Mus musculus
  source 1..315: mol_type = other DNA
tacagggttaattttattagtaattatagccagtaagctatatttatgtattatacaacagtgcatacatatgtagagtagactagcctggactacaaagtaagaacaaaacaaaacctggagctggttctttcctccctgcagatacctacttccaggcagagctctgaaagactttaagtgaagtcaaccatatgtgcaactaactcatatttgcctgtaaatttaactccaggggacctgatacctcaggtctcaaagaggtcatctgtctgtcttacacagtcccggaagttcagctccgggtgcccggag

SEQ ID NO: 53002 - DNA, 236 bp, Mus musculus
  source 1..236: mol_type = other DNA
gggggaggggccacgcagttaccctggaatgtccttattagggcataagcctccagagggcgtgctccaagcgccagctgcaggctccttataaggctgcacttccggagtggtgagacatccctgaggctctcacttttaatgagccctccttgaaagggaggaattgccctcccagtcacagggggcgctgtcctcctttttaacagtcagtacacaaaaaaaaagagtctgct

SEQ ID NO: 53003 - DNA, 188 bp, Mus musculus
  source 1..188: mol_type = other DNA
acaggaaaagaaatggtgacagaagctgtctacaagttttcagtcactcaaaacgccttgtgagccagggtgacttagcagggcccttaagttgtttcacaagcaaagcaagagagagtctctaaaaattcccgactgggtgatgcatccaggcaggcaggtggagggtctcccctcctccctaagcc

SEQ ID NO: 53004 - DNA, 475 bp, Mus musculus
  source 1..475: mol_type = other DNA
tgggccaggcacgggaaccctggacacgcaaccctttcccgtctaggcccgccgggcgctggaggcacccagactccgcctccaaggcatgatctccgctgggggcggagctggcactgggccctagtgtcctccgcgcccaagttcaagcctggcacggcttggggaagcagtacacaattaatttggacaattaattaagttggatgaagttttaggatcatctaagtgattgaaaggagtagaatttgaagctctgaggattaaatgcctagtaggtgtcagtggcctaaggatccaaactttgggaaactctggctgggcgtccgcaggcgactccaggcagcgccgcgggggaccgggtgggggcctgtggccggccggggcggagaagccggggggtcggggtccctccccctggcgcgggctcaggaatccgccgaagggcgggcggaggcgccggggtgggccgcgg

SEQ ID NO: 53005 - DNA, 329 bp, Mus musculus
  source 1..329: mol_type = other DNA
atatgtacacaagagttcaggtgctcccagaggcacggaatccttggagcgatgtcctttggggttccattccctcttcccccagggaaatcttgttggcagggcagcccgtttggctcagtggtgccaatcagatgacttgagttaaaatcacccattccacttggtggaagatgggaaccgagttgttcctccaagttatcctctgtttcccttaccaagcctgtgcagccgggggccttgggttccatctgcagcaaaaatatgatcaagttaaattagttagataacatgccggaatggtaattcccccctcccctccccgtgcg

SEQ ID NO: 53006 - DNA, 435 bp, Mus musculus
  source 1..435: mol_type = other DNA
aggccatggtcatgagaaattctcctgccagtttatttgtgctaaaatgaataaattaaattgaagtattccttttcctgtatcgtaaaagaaacataaagaagttttttttttgttttgttttgttttagccctggctgtcctggaacttaccaggctatctaacaatttgccaaacgtctttagacaactttttatgttagcatttcctgttttttaaaaaatcctatttgttgaaattttacctgatgattcaaaatcttttttcaggaaccattttctgggataaagaaagtagagaattatattcaggtcatttttatctcagagcgttttttggtccattgcaccaatgggctcactccttcccgtcggcccgcgcggcaagcgccggaaggccgccccgcccctcattgtgcggctcctactaaacgg

SEQ ID NO: 53007 - DNA, 226 bp, Mus musculus
  source 1..226: mol_type = other DNA
ggttgggttagacttttgcaccgaagaatatgggcgcggggtatccgggccttattgcgtcccgggtgtgaaaactggaacggaagcgctttctccacacgcccaccgcctggtggcgccaagctgccctagtgcgcatgtgcgcctctgctcgtgcccaaggcgggtcccggaacggccggattcgtaggggtccacctgcgggactgacacgctgtctaatcag

SEQ ID NO: 53008 - DNA, 532 bp, Mus musculus
  source 1..532: mol_type = other DNA
agcagggtggagggggagctgcttgctgatctcccacccagggaaacaggcaagaggactgtgtcagatctcactcagctggagcttccaggttttcagaatctgaaatccggctgtttatgaccaggagagtttgggcgaatacacccgcccatatgccaaggtgctggcctgtaggttggactcagggcagtttaatcgccctcgaaaccagaaggcaggctccagctttggattcacaggcgcatccgagcctccgaacccggccctggccttggggatccctggccgctgggttcgggcccggaccgccggttcccgctccgcggctttgtgcctctcccggcgccccgggcgcgccaggctgggcccggacctgttgggccagaaactctagtttgcaaacgtgagcacgctggggcgggccgggtgcttctgggtgtggggaccggagcacgccccctaaccctgcccccgtcgtgccaccccgcccgggccgcgaggccacctcacccgcagcgcaaataggtgg

SEQ ID NO: 53009 - DNA, 548 bp, Mus musculus
  source 1..548: mol_type = other DNA
gcctggaccagtctggctctagcgcgcccgaccatccggctgcgaccctggccccgggtcctcgcctccaagcagccccccagcacccccgacgccaggtcagcgttgaggacgccaaaagccctgcggcgccggttcgaccggtcccgcagccctgggactgcgcctcgcgcgccacccagcggccgcccgaagacccgcattcaagcagccgggccaagcgcgcagtcaccgggcccgggcgggaggactgggggacgcgctggccgccttcccgatctgcccaattctgctccagggcctgggaacgcagttccatcggggagcggaccgggagcccggcccaccaaaccccgcccctgcccgtgcctgcggcagtttcggggcagggggcctgcacggcgagcctggcgaaaccggcgagtcggcacctgccggcctggcgggcgtggcaggcggaggctccgttacgccccgcccccgggctcgccccgtcccggccgcccacgcgccgagcgccgcgccccgccccggcccgcgccgccagc

SEQ ID NO: 53010 - DNA, 529 bp, Mus musculus
  source 1..529: mol_type = other DNA
gccattaattggagatttttctaatctttttcagagcctgggaaagcaattcagaatttccaatcttttccaattcccacatgatttcctaatttagagaaaataagtctttcccgggaggcgcctcctccttctgatagtggaggcagcctggtgcgtcctctggactcctgggaggccttgagtcgtgtgcagacgaagccctggggctcttccagcactcatggctctcagggactcttagaggtacaggtgtctggatgcagcacgctcgctccgcgaagcactcctgcgcgcagccggatctaggttggggagcatgtggcccgtagcacgcgggtccccagaaggcccctgccagtcactggcctccgcgggagcagcaggcctgggcctctccctgcgcagggcgaatggccgcagcctgccaccagccctggctcggctccagtcccggccagggtgacatcgagatcagatcgcgggcccgccctccaggcggggccgggaacgggaccgggaccccgag

SEQ ID NO: 53011 - DNA, 160 bp, Mus musculus
  source 1..160: mol_type = other DNA
gcttctgagcagagacagccgcctataactctcttatgtgagactgccaggatacctttctcctcagagctgtaacatttgtttgtcagacaacctatttaaataggactcttttttgttgttgtttgcttgctttcaaacgacaaaaaccataaaaata

SEQ ID NO: 53012 - DNA, 255 bp, Mus musculus
  source 1..255: mol_type = other DNA
cagagtgctggcaagttattcaaagtcagaagatgcaccttctgcgagacatccattcttgttgactgaatgtccatgtatacagccacatatatactattttaaaaatagaaatccagtattaacggaaatccccaggcctgtgcaatcttatgcagacacctgggtggatctcgcggcgtcgcacccggtgggcgtcacgtgacagactcgcctccaatcgctgtgcgaggagtttggagctccggaagtgac

SEQ ID NO: 53013 - DNA, 651 bp, Mus musculus
  source 1..651: mol_type = other DNA
atttcctaatttagagaaaataagtctttcccgggaggcgcctcctccttctgatagtggaggcagcctggtgcgtcctctggactcctgggaggccttgagtcgtgtgcagacgaagccctggggctcttccagcactcatggctctcagggactcttagaggtacaggtgtctggatgcagcacgctcgctccgcgaagcactcctgcgcgcagccggatctaggttggggagcatgtggcccgtagcacgcgggtccccagaaggcccctgccagtcactggcctccgcgggagcagcaggcctgggcctctccctgcgcagggcgaatggccgcagcctgccaccagccctggctcggctccagtcccggccagggtgacatcgagatcagatcgcgggcccgccctccaggcggggccgggaacgggaccgggaccccgagcgagccgcgctgcggagcttgtagtcgggccggcctcgggacaaacagcctcggcgtcctcccgccgcgctgcggtgtccccgcccgcgcgcccgccgcacaccttccgcgcccagcgtgagtcgcgcacctgctctcggccccccacgcgcggcggtggcggtggcggcggctcagcgcgcaggcgcggccggattccgggcag

SEQ ID NO: 53014 - DNA, 470 bp, Mus musculus
  source 1..470: mol_type = other DNA
aagaggttattgggtcccatgactgagctgttgtgaccctagcaccttcctcaggatataggagccaagcaggcacttcctgtgttataggaagtcctctcaccactgcttctgtcctgcagcagctgccccaggagctcctgtgtcctggggacaggacgtcctccctttgtcaactcactttgaggtgtacaggggagaactgggaggccccggtgcccactagacccaggttcagctcccagccttgacctaagcctgggatgggggctggaaacttcagccccaggctgggggcctgagttcctgtgcagtgcaggaaccactgaagcctcagccttctggctgggcaccaaggacccgtgcccaccaatgcggcccggcccccagagagtcaggcccacagagcacgcccatgtgggccggcggtgtggggagccctcggcggggcatggcccctgcacctgccg

SEQ ID NO: 53015 - DNA, 529 bp, Mus musculus
  source 1..529: mol_type = other DNA
tagctcacgccgaggtaggctcggccccttactcctacgcacacgggcagagtaggcaggtgcagctctgacaagtccagaagcagcagttctcaacctgtgtgctgggacccctttgagggtcgagcagtcctttcacaggggtttctctgtgtagccctggctatcctggaactcactctgtagaccaggctggcctttatgattcttacagcaaaattacagtggtgaagtagcaatgaaaataattttctggctgtgaggtcaccaccgcattaggaactgtattaaagcgtcacagagttaagattcagagacaaggttcaaattctagtttgaacatggaactaaagacctccctgtccatgcatgtgaggccaggtaaacagacatccacagtgggattagcctctctcacccctgggagtgggcatagtgacctgcaagaggttagttgggtcccatgactgagctgttgtgaccctagcaccttcctcaggatataggagccaagcaggcacttcctgtg

SEQ ID NO: 53016 - DNA, 289 bp, Mus musculus
  source 1..289: mol_type = other DNA
gcgggttgcaccgctcccctcccggaggctcccggcagctgtgcacgggagttcccggggaagaggtagaaggcgggccaggtagttcctcccgcctcccccgccctctgcaaagacagagaagaatccttgtgtctgaattcaaaccaaaatctggtcttttctttccatatatgaaataacaagaacagaactttgcccgggtttcgactactcaggcctgatcaggatcacttcggctaagctgacctggaaaagctttgcgcctagaatttgactgcgcgcgcgc

SEQ ID NO: 53017 - DNA, 275 bp, Mus musculus
  source 1..275: mol_type = other DNA
gcagacatgaggtgggatgggctgccttcctcacctgaatggtttaagagctttattatagcctctgctttgatcttgatcaaagactgctcaacctcatttgttccaagcttaaagaaaataacaggcctatgtacacagatccacacagcaggacactaagtggcctctagcgctccaattggtcggtgaagtcactgactgggctaggaccgcttcaggctgtccggggctgcctcgcctccatcctggccccgcccccaggcggagcggag

SEQ ID NO: 53018 - DNA, 415 bp, Mus musculus
  source 1..415: mol_type = other DNA
cctcagttccgaagtagtcctgggaacctcgcccgcctaccgtaaggtggggcctgccagggtcagcgcccggactctggttgttgtctccaggcacaagaggtaagagaaagtcccctccctttgtactttggccccgggggcgggaggcagaggtggagggacgtgggcgggttgcaccgctcccctcccggaggctcccggcagctgtgcacgggagttcccggggaagaggtagaaggcgggccaggtagttcctcccgcctcccccgccctctgcaaagacagagaagaatccttgtgtctgaattcaaaccaaaatctggtcttttctttccatatatgaaataacaagaacagaactttgcccgggtttcgactactcaggcctgatcaggatcacttcggctaagct

SEQ ID NO: 53019 - DNA, 316 bp, Mus musculus
  source 1..316: mol_type = other DNA
gcgcaaagcttttccaggtcagcttagccgaagtgatcctgatcaggcctgagtagtcgaaacccgggcaaagttctgttcttgttatttcatatatggaaagaaaagaccagattttggtttgaattcagacacaaggattcttctctgtctttgcagagggcgggggaggcgggaggaactacctggcccgccttctacctcttccccgggaactcccgtgcacagctgccgggagcctccgggaggggagcggtgcaacccgcccacgtccctccacctctgcctcccgcccccggggccaaagtacaaaggg

SEQ ID NO: 53020 - DNA, 209 bp, Mus musculus
  source 1..209: mol_type = other DNA
ccagaatgcttcagtaaacttttattttattcgaacctgctttgtagatcaggttagccttgaactttatattgtacctggtatacctgtgccaggggaaggctctcaggtaacctggaactacttgttctctggttggaatattacttccttcaaagaaaacctgtgtctgtcatcttccctggtgagtgatgcataagaaactgggc

SEQ ID NO: 53021 - DNA, 418 bp, Mus musculus
  source 1..418: mol_type = other DNA
tgggtataaaacaccttgcaaggctcattacagtgccccagggacttcccaggggactgataacggattgcgcgtaatgagacaaaaaatgacatacataaaagatagaactgtaattggccccatttaacacttcaaaactgaggcgcagatggcactctttagtaaaaatgtgacagacagacagacagaacctttcactgcttgtgagaccgttaactcttttacaagcttgggaaatggggtaccgggtggcaccaagttgagggctgccacctcttggagctccgggcgcccatcaaaccggctttacccccgaaccgggtacccgggtgtccaagtccggacgctagatcccggaagcagggtcgccccgccccgcgctgcagccccgcccgccttcggacgcggggcgagg

SEQ ID NO: 53022 - DNA, 340 bp, Mus musculus
  source 1..340: mol_type = other DNA
ccccgtccagagcactgtgaaggcgcagcagccgggctcaaggcagcccaggcgcctcctcttccggctgcacctacgcgggaagctaacctgggcgtcagtcgagctgggctctagcacctccttggagtatccgggcttgcgccgaggccctaggcagcctgaaacagctggatcactgaccccctgagaaaaaccctccagaaaaacagtttttcctccgcgtgggacaccttattccaaggactgacctcagactgtaagagtcaggcacagtcttcaaaaaaccgtttctgaccgccgcgttaagagaggccccgcccatgcaggggggtggagc

SEQ ID NO: 53023 - DNA, 347 bp, Mus musculus
  source 1..347: mol_type = other DNA
ggttctgtaacaaagcaggctgagcaaagcagcactcctccatggcctccagcttccttggaaccatgagtgaaacaaaccttttcttttctgggtttctctgtgtagccctggctgttctgtagaccaggctggcctcgaactcagaaaggcgaaacaaaccttatactagtcctaactaagacagcaggcttacatatgtcatggtccagacctaagggccacgttaccagggagacggtggtacccaaccatagctctggccaccagcaggtcagggtcaaatgtgcagcagacacgccgcgtcacttccgccctcagctaccacatgtgggaggcggggccga

SEQ ID NO: 53024 - DNA, 486 bp, Mus musculus
  source 1..486: mol_type = other DNA
gccccagggccctgctgggcttctccccagcccccttgttagcctgggaagggggccaggccctgagctcagaccttggcgattccagagtgtctgaggcccagagccagcgccgccagccaggcctccccggccagtaaaccctggccagattgaccaggtggtgggcgggggaggtgtgcacaggcctctgcaccccgcccggaggaatctggcggagtccccaggtgaggattcttctggaaagaacccaggtcggttcctgcgcggggcgggcacctagggggctgcccccactccaaccggcgccctctcgcttctccgggcagcagcgaaatctccctggccccgggccagcgtcccagcccccctcgccgccggcgcgctccccccgcgcgctccctgcttcccggcggccgcgggagaggagcccggccagggggaggcgcggagcgggctggccgcccggccttcctctcccctcgc

SEQ ID NO: 53025 - DNA, 251 bp, Mus musculus
  source 1..251: mol_type = other DNA
agcgtgtttgaaggaagtgggcaagaattccaaggcttggagagcacgagattccaagcctggacgcctactctgcacaggggagggtcttactgttgcaacagtgttactagagcagggggaggggtcccccctcccaagtcctcctagattctagcagcaaggaacgcagtaggctgtactgagcagcgcctgagctactgagcaattcaagcagaaaccagacttggcatggttctgaccctggtcac

SEQ ID NO: 53026 - DNA, 155 bp, Mus musculus
  source 1..155: mol_type = other DNA
gctcctaaaactggagttacaggactctggctaggtgtctgaagccagctacagtgtagtcatatacataaaataaatatatcttaaaaaatgagagcaataaccattctctcactactacgccctgcccagggaggtctgccttcagtcctccg

SEQ ID NO: 53027 - DNA, 237 bp, Mus musculus
  source 1..237: mol_type = other DNA
tggacctgtgctggaccccaccccaagtagacagccagcctggctgaaatgcagcttaaaaatattttttctcactaagcaaaaatgttttctaaattacatacacacattcattctatatgcatgtgtaccatacaaaatgcccgcactgacgtcaccctgcgagcaggcggcggcaacgcccgagaagtcacgcgcccggtcccgtgggacggaggccatgacccgcccctcgtg

SEQ ID NO: 53028 - DNA, 481 bp, Mus musculus
  source 1..481: mol_type = other DNA
ggctgccagccctagcagctcacaaagggaggcggcgactcacgacccgcgtatccttgcggacgggttccgcggtcctccccgccctccctggcgcggctttctccatggtcctgggagaaagagaaaaacatcctttcccgggaccttgccgccacgggccgggctctgacggttatcgggtggtgctcggcatggccgccaaggtcgccgtgccctcacctgcagcgaccatggccttgctgggctgagaccgcagcctgcgctcgtgtacccggggcagccggaggctgcagggtcactttccggagggaaagcctgttttaacacttgcaacatacgctataccctcggtgttgaaacatctgaaaaacttggggctcccatttttaatagctattagttgtgaccagaaattttaaacctatttgtacctatttagctggtacaagctaaacatttccttcaccaaggtggtgga

SEQ ID NO: 53029 - DNA, 237 bp, Mus musculus; identical to SEQ ID NO: 53027
  source 1..237: mol_type = other DNA

SEQ ID NO: 53030 - DNA, 350 bp, Mus musculus
  source 1..350: mol_type = other DNA
gccttagggccgaggctgtgcccacccttcgcttggtcagaggagcctgcctggtttctaaggcatgcccctgttctctttgtgatgtccgattaaagggggagcacgcgccagaggcccctctgcccgggctccttcacactgagccctgagacgtcaggaaactgcacagtcactgcgcattggcaggaagccttcccatccgcaaatttgcggcttctggtgggaaggggcccatctctcacccttcccccaagtgaactctttttatgaaaacagatctcatgcaggagctctagcaataagtcagtctgtcccatccctcccccaacttgatttgtgggggcagg

SEQ ID NO: 53031 - DNA, 315 bp, Mus musculus
  source 1..315: mol_type = other DNA
ccattaagtttgtccctaaatgaactaaattgaaatcatctgctttcccaagtgactgctggcaccaggaacaatttctgcatgtatatggacttgttttctccatacatcacaatgcctggcacttcgggctggaggctatgtctctaagacagccaggtccaacctacattcgtaatgagagtgaaagggattgttgggagtcccaatggacttgtccagggccccgattcctacccaaggccaagggccttcagaacaggcctgaggctggctccgattggctccttcagtcggagaggcggggcccttcct

SEQ ID NO: 53032 - DNA, 289 bp, Mus musculus
  source 1..289: mol_type = other DNA
gcaagtgacaccatgttagtgtcctttacaccctaaaactgcgttgatgtgtaccacatggtctttgctttaaacatgtaaacggatcaagcagtaagggacttgtccagagaccgacttctgttaggaaagtttctctcctattacatatatattacatataaaggtccttatgtgcagaggcaggggcaccgggggccaggggtcattacaattgtccctgagacaatgccggcattagggcctcacggctgagagcccttttcccttcttagtttttaaagaaagg

SEQ ID NO: 53033 - DNA, 413 bp, Mus musculus
  source 1..413: mol_type = other DNA
caatgccggcattagggcctcacggctgagagcccttttcccttcttagtttttaaagaaaggaactgcaactgttgcagtttagaaacaggtgtagcgcagcagtgggccactgcacagtcaaaagcccattgtttcttcccctgggcaaaagtaggcataggtggctgctgcaggccactgtagcctgggactgccacctcgtggccacgttctgacttcacatagccccacagcttgtcagggtaggtgggaatggaactggctggtcaagcagggcccaggtccttgctcactaaggcagccttcgagaggctcgccaaactaggactcagttggcatcctctgtgagccagcatggctgtgcacagagaggtctgggcactgggccaccacgcacactccagccaggg

SEQ ID NO: 53034 - DNA, 239 bp, Mus musculus
  source 1..239: mol_type = other DNA
ggaaacatgtttgttacagcccattttgggcactcactttccattctctaaaatgggtgtcaacctcgtggctaacggccagccaggcaggacactgtttccaatcgcgcctgcgcactgggatcctaggctccttcaggacaggtcgttctcgagcgctcgctctcgtgggcctgtgcgtgcgcgcaccccctagctgcgcctgcgcagagggtcgaggaccctgtgtcctgagaagg

SEQ ID NO: 53035 - DNA, 161 bp, Mus musculus
  source 1..161: mol_type = other DNA
aatatggtcatctttagggaagcatgacccagtcctggaactgtccttcaataactgtttctgatcctgttcgaaggatggtcagagatttctcaagaattctccctcagccgcccggaggctaagcctctagaatcttggattaggcccaaggtctgcac

SEQ ID NO: 53036 - DNA, 445 bp, Mus musculus
  source 1..445: mol_type = other DNA
tctctagctaaatacttatatatcgactgaagtgtgctcagattttcctagagcaccctgaggtcactgttgccagagaaagctgagccctggcctgctactgcacagagttgtctggactatgcactgcctgttcgtaggccaggagtacagggagtcaggcactaatccttagcaactgagtagtcttgataaaatagatttaaaaaaaaaaaatgtcctttcttgccaccggtgtggccgttggcaagaccagaggccagcgctgtccattgactaaaagcttacattcatgggtggctgtcaaggcacgccggcccagacccctccactcaggaagctcctcctccggagggctcagcatccaatcagatgtaactggaggcggcgcgacgaggttttcccagccttgagagacccgggtgagggctgtgcgcgctctgcg

SEQ ID NO: 53037 - DNA, 275 bp, Mus musculus
  source 1..275: mol_type = other DNA
tgggtgccattctgtagaccaggctggccttaaactcagggtcaggaggtctcaggtcccctgaaactcttgcagagacaggccgtcacagatcaattgacctaagccaaatcaatggagattttggttcgaaaatttggtacatcaagaagagaatgcactccttcccttccagggccgtgctggacacacgtgtcagtcactgcaagtgacgcgcagaggcgcgttctgcgcagctgcagtgggaggaccggcgcgtgcgcggggagggcggg

SEQ ID NO: 53038 - DNA, 402 bp, Mus musculus
  source 1..402: mol_type = other DNA
cgggcctctgctgccctctcccgggtcaggtaacccccacaagggagctgagattggctaaggccattgtccctctttttttttggggaaatcgaggcacggatttacctaaggccatgcagggtgtgcgcaaagaccgctagggcggagtgctagctctgcaggcctgcgccctaaggtgagggggtggggagctggctcagccctacagcgggtctgcggcagggaccggccggggtggaggggcagctccagcaagcagttgcagccaccatgctcgccgagcgccggctgggctggaagacagctgcaacccagagttggcggcgtcactgagccggatcgtccccagtaccttcggccggcggctctgcaactcgagctgcggccctccgggagaca

SEQ ID NO: 53039 - DNA, 360 bp, Mus musculus
  source 1..360: mol_type = other DNA
tttcttttttgacagacaagatgtttaattccgttgtactgaaggaaagccattttatgtatttttcttaagtgctctatcagtaatgacaattctgaaagcccccacaattcactgtccgtgttgtgactcccacagtataaattcctccagttatgaatctctgaattccgagtgagtccgagttaaaaactgcttgtgtgagccctaacagacagaattgtcagtccggacacgcaagcactgctccttttgcgggccccgtaagcatccccccaggcgggatagggatccccggccttctcagctggcaccagctgccttggcacccagtctacacaacctgcgttggggggaggt

SEQ ID NO: 53040 - DNA, 328 bp, Mus musculus
  source 1..328: mol_type = other DNA
ctgcttgtgtgagccctaacagacagaattgtcagtccggacacgcaagcactgctccttttgcgggccccgtaagcatccccccaggcgggatagggatccccggccttctcagctggcaccagctgccttggcacccagtctacacaacctgcgttggggggaggtctttcatgcctgacatatggctcggcccgcggaacgccgctcgttccggttgctcgcgcacgggccccagaagcgcaggcgagatcggagcgcgctggtacggtccactccgccgcgccccgcgccgccggaagtgaggtgtcttacccccgaagttccg

SEQ ID NO: 53041 - DNA, 456 bp, Mus musculus
  source 1..456: mol_type = other DNA
cttgtgcttacttgcatgcatgtgcacacataaataaaatgacacctgcattagatgaggcttcagtcggggaaagtgtgtggaccaacccttcctctccattaaccatgaaggcagaggcgtcttcatcagctcatgcccagctgagcataacgcccaacttttggagtgtcgaggtgcctagaaaagaaaagcaccatctattcaatgaatgcttgtcggagcgggcctctgctgccctctcccgggtcaggtaacccccacaagggagctgagattggctaaggccattgtccctctttttttttggggaaatcgaggcacggatttacctaaggccatgcagggtgtgcgcaaagaccgctagggcggagtgctagctctgcaggcctgcgccctaaggtgagggggtggggagctggctcagccctacagcgggtctgcggcagggaccgg

SEQ ID NO: 53042 - DNA, 468 bp, Mus musculus
  source 1..468: mol_type = other DNA
ctaccaccaggttttagtggggatactgaaaaccagcatgcggcctgcttgggcctctacgccacactggcctagggtggcctcatcctccagcggcgagcctgccagaagcacgacttgatcttcgggggcaatgccgacaaactttccccgtggcagtacatacttactttgatctggaccgtctcctggccggggattgcgcggtctcccatgcggaaggccaggctcgccggggacccggagcccgtagaccgctggctaccgagcgctcctggcccagcagtccccccccgcggacgccgctgctgctaccgaagaagtgggggcgcgcacgtcctcaccgcctgctgcgtgtgacgtcactgcagcgcgaccgcgcggatcgctggtggtttgtaccgcccaccgccgtcccagccacgcaggcgttcgggcctgcgcgcgcagagggaggcggggcgagcc

SEQ ID NO: 53043 - DNA, 309 bp, Mus musculus
  source 1..309: mol_type = other DNA
tgcgagacagcagacctgcccgacatgccgcatggatgtcctgcgggcatcgttgccagccgcccacagaggaccttctttgtccgacagtgctggggaatccccgagcctggggtgagactgtcagcccgctcaggagaggctgcggcccctccacccaccgaccaggagactgacttcctagtggagcagccaccaccacagctgctggcaccagtacttctgccccagcacctgggtctgtacctggcccagaggctggtcctgcccccgggagagctgaggcccaggtagctcagcctgacctct

SEQ ID NO: 53044 - DNA, 448 bp, Mus musculus
  source 1..448: mol_type = other DNA
aggaggcccctgggtctctctaaggcaaaacaaaccatctttcctttagtttaattaacacaggagaactttagcttaaaaaaaattctcagcctatacagtactcttcagtatttgtctttgaacatgtttttgaaactcttcaggcaccgagcggggacatacagctgctctcggtcttaccctcttgggatgcggcagccacacaggcgagcaacagtgaggctcacacagcttccgtcgcccgtagctccgaccgaggcagctcctcagcggctcgcaacaccgctgctgccatcttatgcgcgcgcagccgggctcgccccgcctccctctgcgcgcgcaggcccgaacgcctgcgtggctgggacggcggtgggcggtacaaaccaccagcgatccgcgcggtcgcgctgcagtgacgtcacacgcagcaggcggtgaggac

SEQ ID NO: 53045 - DNA, 480 bp, Mus musculus
  source 1..480: mol_type = other DNA
tggtttttaaaagagatttatttattatatgtaagtacactgtagctgacttcagacacctcagatcaggacctggaagtagtcagtgctcttaactgcataggcccatttgagctccagatttgttaaacatgtcggttttgtctgttattattatcaataatattttttcgagacagggtttctctgtgtagccctggctgtcctggaactcactctgtagaccaggctggctcaagatagagcattatgtagctgtatcctggaaagcactgactacaggtttgccaacgctgggattaaaagcgtaccactacgcccttagtttatttttgtacaatttggtacaaccataaagaacaaactgggattagcgacatgattttcccaaattcggcgagcaaacctgttcctttggaagagtttggacgacttctgcgcttgctcaaccgagaagtttcggaaatgtgcggtggcgga

SEQ ID NO: 53046 - DNA, 333 bp, Mus musculus
  source 1..333: mol_type = other DNA
atcactttacgtaatctctgtctctgtccacctgcaggtgtcggtgctgactggcatcattaagatcagcttgaagacactactggagtgtgtgcgcctacgcacctttgggcgctttgggctgcagcaggtgcaggtggactgccacttcctgcagctaggagctagtgcacctgctgctggacgaagtagtagcctcagctgctgcggcgcggctagaatctggcctgcaggggcgggacccgcccgggttgggtttcagtgccgaagcttctgaggcgccagcatggggcccgcctcccagcgctgattggactgtgctgggcccaggtg

SEQ ID NO: 53047 - DNA, 288 bp, Mus musculus
  source 1..288: mol_type = other DNA
aaaaaaataaaaataaaaagtataccatttagatttttttttaactcctaattttcagataaaaacagtgtttggtctgctgaaactcctggcagcccagcacatcattagtaaagtctcattttcttctattaggctggctggacttcttaagattaacatcttaaattctctaagtagaataaagtttctcatattgaaccatattgcaggatggaggatgcaggattgggagaagttcagtgaaacctctgtgccagctgcagaggaacgtttcacctgaaggac

SEQ ID NO: 53048 - DNA, 394 bp, Mus musculus
  source 1..394: mol_type = other DNA
gcagtcaagagtggattcctgaatgcattgaaatgaggctgggcatagtgttcgaggccagccttgtctacaaaccaaccctaggttaattagtactagttaaatgtgatcttgaaaaccctatttatctttcatgctataaagatgtttcctgaattactctgtagtcatcccagaatactatctaaagaaaaggaaaatttagattaatttccagactctgctcattgaattagagcctaggatgtggccaaagccttcctttgcttggaaaagcctttggctattcatctaggccttaatcatctgcctaggagctgggacatgatactgagctgccgtagaggattgaatggcgtgggctcagacacattctgtttgttggaatcaggct

SEQ ID NO: 53049 - DNA, 327 bp, Mus musculus
  source 1..327: mol_type = other DNA
taggctgatcagctctttatcaaccaatcagagatgatttaaaagactaaggatacctaggcattagatttccgcttggacgacttcgaaggcttagtaagtgaagtcctgggccctttgctagttcggaaaagcaaaagtcgttttccaactcgtgctcaccagaccgctgggcagccccgggaactttgctgcttcaaacgttcaaattgcccgccttgaggcggaccatccgcttttgttgtcacaggctttacgtctagctagcaaaaggcagaggcgtatcctgcggcgctgtggcgtcatcagcgtgcgccgcacccggaa

SEQ ID NO: 53050 - DNA, 315 bp, Mus musculus
  source 1..315: mol_type = other DNA
gtcacaactggtgccccatttccatttattgagtgaccatttattgagcagctactgaacgtgattggctactaggcagaacaggttcgtcaccttcctcttggggcacttgcaaagtcccttttggtggctgccagtctggccgaccacattctggatgtccgcgaacctccgcgatgccgatcgtgaccgggctcaccaactccggtagctgcagctcttccgggtgcggcgcacgctgatgacgccacagcgccgcaggatacgcctctgccttttgctagctagacgtaaagcctgtgacaacaaaagcgg

SEQ ID NO: 53051 - DNA, 391 bp, Mus musculus
  source 1..391: mol_type = other DNA
cctggcagatgtctgtagccttctacagagttgtaggccagcaatgagattttgtctttgaaaaaaataaaagaagggatggcaagcctagctctgcctgccccctttaagagccccatttctcccacaaagtggactgtctgagggacagaaacagacaggcctgtaaatctacaacaatggcatcttgcttcatgaagacagcagcatggttttgagagaagctaagcgaattgtctaacatcacacagcaccccagtgaggacccagcaggtaacggtgctcacagtggggcagtcacagggccccatatgcagtcaggattctgacttccaggcctggtatgccctgctgatcctgcaggatgtcctggcttttcaccattaatggt

SEQ ID NO: 53052 - DNA, 472 bp, Mus musculus
  source 1..472: mol_type = other DNA
ggtatgtgcagacacgcgcgcgcgcacacacacacacacaccacacaacaatgatgattgttttgagacagggtctcagatgtgtagccctttctgtcctcaatatatatacagacccagcaaagaaaaaaaaattttttttaaagaactcttgtcaaagtcatttactgaagataatctgaacatgccagcagccatgaggctaagcaccaggtgggcttgccagttttatcctaacagttgggatagagcgtctcaaccgatagggtcctacactcgcattgcggggagcttgggatgattcgtcagctctttgtggaaccagattccgactcctagctcagaatctagatactgctcgagaaagtcagcctctgtctggcatccgaccgaggcctcggagtcggaaggcttagggacttcgtcgccgcagcgcctctagggggcgacgccctgcactcctgtggtcacg

SEQ ID NO: 53053 - DNA, 285 bp, Mus musculus
  source 1..285: mol_type = other DNA
tctttctttttttttatggttggaagaaaaaagattctttgactagtgaaaatctcataaaatttaaatacgtgtgagtaaaacacagtctggcacatcatacccattatgtttataagaagataaagacccttgccaaggcatcctaagcagccccttttataatgggtcaggcctacctgactgttgccaggtagctgttgggtggagcctacctggttgttgtcagctaactgctaataataactatgaatgagaatcccagccctggggaggtgtggcctg

SEQ ID NO: 53054 - DNA, 271 bp, Mus musculus
  source 1..271: mol_type = other DNA
agagcagtcagtgctcacaaccgccacaccaatttggccttgatcaattatctgatctgttacagaagatactgtgtcaggtaccactcccaaatttgaagcagttaaggggaattcaaatacgtgtaacagcatcagaaaatgcaccccccaatccgcacagggaggcagggacacaataaaagttgcatgggttagaccctatgccaagcacctgaagttccagatactcaggaggcttatagcttcacatgccaggatgccagctggt

SEQ ID NO: 53055 - DNA, 377 bp, Mus musculus
  source 1..377: mol_type = other DNA
gcttataaatatctgaaactctagttccaggggctccagtgccctcttttggcctctgaggacacggggcatatatgtaggcagagacatacatgcaagcaaaacactggtatgcataaattaaatttaaaaagtttaaattcttcatcatcagtgtagaccaggctggcctttaactcagatacctgctgggctctgcctctgagtccacttttatattttgagaatttttagttcttacttggcttcaaactcatgaatcacagctccagtgtggactgtgaacctggactttctcagagactatgggggttcttctagagaaggggcctaaccggaaggctgctcttgttagggattctgggcagcccatggtt

SEQ ID NO: 53056 - DNA, 281 bp, Mus musculus
  source 1..281: mol_type = other DNA
gagttactgagatagtttcctaagccagtaggtgcttaatggccatgggtccatccacactaggctgtgtaggcaagtgattcataaatcctttcatttcctggttggattaaatcagactacaaaagatacaccacagtgctgtgtatggagagtgcctgcacacacacacacacacacaagaatggggttttttgtttgtttgttttgtagaccaggctggcctcgaactcattttttcaagaaacattttgtgaaaccccgccctgcctcaaatctgc

SEQ ID NO: 53057 - DNA, 396 bp, Mus musculus
  source 1..396: mol_type = other DNA
ggagtccagctctgactagggagactttctagctcagaattctaagcacagcttaggtgcccttgaacaaaacaatcttgttcttggactggggatgtaactcccctggtggagtccctcctttcataaggccctgggctcgaccccagcacagcatgaactgctcctgccttgactccaagagcaggccagcctggtctacagagtgagttccaggacagccatggctacacagagaaacctgttgattttgtaatcactaaaagacatagtagttactgggccactcctgggcctgcctcactccctctagtattcacactagacagcctggagactgcattctgaagaaaccacagaccctgatctcaggggcctgaaatctgatatctggga

SEQ ID NO: 53058 - DNA, 341 bp, Mus musculus
  source 1..341: mol_type = other DNA
ctgggaacttttggccagaatgccaaactcttgggtttgatcaagaactccccaaggcacatcttggcaccagaggagctggagggtagcaccttctgccctagggctgtcaaactacagaccatgatgtcaccatggacttcatttcccaagctccaacgccggatgcaagggggatggctcagaccaaattgtgggcctggcacatcatgaattcgggagtccagttctgagctggactctgccccagtctaaactcagcttttctcggaagtactgagttcctcgaggccccgagtcctccctgacgcagccccccctagcggagggaggtgcgggcc

SEQ ID NO: 53059 - DNA, 340 bp, Mus musculus
  source 1..340: mol_type = other DNA
cctggcagtggtggtgcacgcctttaacgccagcacttgggaggcagaggcaggctttagaggccagcctggtctacagagtgagttctaggccagcctggactacagtgtgagtaaaaaagttttataaaagtgcaaatgtgcatttgttgccaaaagatagactgcaaaattcctttgcagcctttccgcagcttgaagcaaggaggttaaaggcgcaagcgtaaactacgattggggcggccaatcagtgggcctcgcccttcgcaatgaccaatggcagcgagcgtgggggcgtggttgggcgtccgggggcgcggcctggcgctgagagaagcgg

SEQ ID NO: 53060 - DNA, 212 bp, Mus musculus
  source 1..212: mol_type = other DNA
gaatcctgagagtgcagatgtattcccagacatgggtcagctcaggggtcccacctctacttgtctgaggtggccacctatggccctgctctgggcactgatgcttaagcccagagccctaagccaaaccctcaggcaagacccatggttgcagccagagccgctcccagtctgatgaggcggctctgggcttgagcctggacttcgctcag

SEQ ID NO: 53061 - DNA, 240 bp, Mus musculus
  source 1..240: mol_type = other DNA
ggccacctatggccctgctctgggcactgatgcttaagcccagagccctaagccaaaccctcaggcaagacccatggttgcagccagagccgctcccagtctgatgaggcggctctgggcttgagcctggacttcgctcagtcccaggatcctgcagagaggaggtccctgcacctgtgctgaccccccgtggtggaagtgcccactggtccagtggggctgctgccagcaggctgccaa

SEQ ID NO: 53062 - DNA, 658 bp, Mus musculus
  source 1..658: mol_type = other DNA
cctgggcgcctagggtctggcgggggctctcggagacaaaggccggctgggggcaatggctccggaggcctttggtatcctcgcgttgcggaaggggcgccgcgggtccacgacgagcgcgttgccgggcaccacgccctcggtggggccgtgcatgaccgcgatgaaggatgggctccggcccgatgcgcatccccgggaagtcctgctcgagtcttgccggtgctgtactggccgaccaggagcaccatcggcttgttgtcggtcctccagcgcgggcgagtggaactcgtggaagcgatagtgctcctccagcggcagcagcttctgcgcgtacagctgccgcagcccctcggccaccgtctggaagagctccggctccttcgtggctgagcgggactggggcgcgcggccgaggaggggccggccggccggcggagggcagaggggcagggggcggggcgctgcccgcaccgcgcaggcgcaggctcgagggccggcgtgaggaccacgacagcgccctctgccgagggtcgcgcgaacctcgtcgagccgcccctttataataagccggagcccggcgttcccgcacgctggccgccgcctcgaggctggcccgagaggaggcgggggaagagccctccaggccccgccccat

SEQ ID NO: 53063 - DNA, 373 bp, Mus musculus
  source 1..373: mol_type = other DNA
gcggaaattttggggcttttaatttcccctaagttccttggttcagtctgagtggagtcccagcgcacaaagggtgaggctcccgatgctttaggaagtactctggccacacttccacgagccatccctcgaggggatggggcggggcctggagggctcttcccccgcctcctctcgggccagcctcgaggcggcggccagcgtgcgggaacgccgggctccggcttattataaaggggcggctcgacgaggttcgcgcgaccctcggcagagggcgctgtcgtggtcctcacgccggccctcgagcctgcgcctgcgcggtgcgggcagcgccccgccccctgcccctctgccctccgccggccggccggcc

SEQ ID NO: 53064 - DNA, 294 bp, Mus musculus
  source 1..294: mol_type = other DNA
atcctgtcaaggtcttcagcttgcagtctgcaaaagacaccagagcacccttctctttggtatctgtcagggccgcaaccgtccctagcccctctggcctggctaagggacaggccgctggccgggtcccgcgggaagttgcgctaggctctggcaccgtgatcagaggggccttttgcgaccccaacggacgcctcccacttcctggacgagggtcggccccgcccccgcgcgcctccgccggctcccattggccggcgcgcacctgcccgtccgtcgggggcgggcttggag

SEQ ID NO: 53065 - DNA, 292 bp, Mus musculus
  source 1..292: mol_type = other DNA
agcaagatcctgtctaaggtaaaactgaccttgaacttcctgggggctaaagggtcctgagccagagccgccagggctcttaactctgagtcaatttcaaggactggtattggaagaaacagctgagcaggggcgctactgcgcctgagtttaatcctaggactacaatctcccagaagtcacggaggaacttcttctggcgtgatcctagatgaccaatcgttgaggagctcagctgagcagcaggatccccatttcccagcaggcagtgcggccataggaggcgcgggac

SEQ ID NO: 53066 - DNA, 458 bp, Mus musculus
  source 1..458: mol_type = other DNA
ccccaggcctgcggttcaggccccagagccctggctcggtccaactcccacttgggggctagattgaccttagccccagagcacagttgctacctggaaactttatatagagttccatcctttgggaatccaaatccctcaagaacagagcaggacctcttccagccctctgggaacctccctgaggtcccaggaggaaatcgacggggtgggggagggccagcctcttcctgttttgtacatagatttatttttcagttccaagaaagataaatgcattttgttaagaaaaaagagagatgtatgtatgtgtttcattgggaggggtacctaagctccgcccctgcttctgccccgcgcaaccagggcgcctcctctcggccaggcgggcggcggggcagccccgggctggccccgccccgggctggccccgcccctacggcctccgagtctcggcg

SEQ ID NO: 53067 - DNA, 603 bp, Mus musculus
  source 1..603: mol_type = other DNA
cacttgggggctagattgaccttagccccagagcacagttgctacctggaaactttatatagagttccatcctttgggaatccaaatccctcaagaacagagcaggacctcttccagccctctgggaacctccctgaggtcccaggaggaaatcgacggggtgggggagggccagcctcttcctgttttgtacatagatttatttttcagttccaagaaagataaatgcattttgttaagaaaaaagagagatgtatgtatgtgtttcattgggaggggtacctaagctccgcccctgcttctgccccgcgcaaccagggcgcctcctctcggccaggcgggcggcggggcagccccgggctggccccgccccgggctggccccgcccctacggcctccgagtctcggcgctccgccccaccccgcgccgctccgcgccggctccgcagcttgcgcccgccggcgggtccggcgccgggccatggcgctgttgcgggacgtgtcgctgcaggatccgcgggaccgcttcgagctgctacagcgtgtggggggcgggagcgcaggaggagggtgcatcttcacgtcccgccgcgggaaccccgg

SEQ ID NO: 53068 - DNA, 605 bp, Mus musculus
  source 1..605: mol_type = other DNA
ggggagggccagcctcttcctgttttgtacatagatttatttttcagttccaagaaagataaatgcattttgttaagaaaaaagagagatgtatgtatgtgtttcattgggaggggtacctaagctccgcccctgcttctgccccgcgcaaccagggcgcctcctctcggccaggcgggcggcggggcagccccgggctggccccgccccgggctggccccgcccctacggcctccgagtctcggcgctccgccccaccccgcgccgctccgcgccggctccgcagcttgcgcccgccggcgggtccggcgccgggccatggcgctgttgcgggacgtgtcgctgcaggatccgcgggaccgcttcgagctgctacagcgtgtggggggcgggagcgcaggaggagggtgcatcttcacgtcccgccgcgggaaccccggcccaggcccgtgacaccgtcacgtccgaactggccgcggtgaagatcgtcaagctagacccaggtggggccgcgggggcagagagttaaccctgctcggcaaggagagaaatactctatgctcattttgcacatagggacagagttgctccccaggggacgacat

SEQ ID NO: 53069 - DNA, 530 bp, Mus musculus
  source 1..530: mol_type = other DNA
tggcccaggagcctgctgcagtcagtccaggaggccctggaggaacccacacttggggtgaagaggggcctccaggcctgggggacagtcccctctcacaccccatcatgccatggcatcatgggacacctgctgatgaccaggctgctcctgatcctcttgacaggagctggactccccggatgatgccatcggaaccatcaaacgggctccatttttggggctgccccacactgagtcaaatgcccagtcctgctccccaggtgaggcccagggctggcaggccacagctatggtctgtgcatacaggtaccctgtcagcacctccagctggccctggcagccccgcattgcctgcagggtgccacctaggccctgactccttcccccaaggtgcacgtaagtggtcactggctgtccctagggcctgctgtcctggcactgccatgcagatccatgtcacttgggttcaccctgtgactcgaggtagcttgggctaccttatgcccatgcctgcagaccagttcctg

SEQ ID NO: 53070 - DNA, 287 bp, Mus musculus
  source 1..287: mol_type = other DNA
tccaacctgggactctggaagagtagccagtgcctggtcttatctgctattttttacaagttccctaccatttttatgggtaattttaaggtacccgaaacaaatttccaacgcattgagatttccctggaagtgctacttgtttgtaccgatataaagtctttaaatttttcagagaaaacaggaagcctccgttccgcccctctggggaagggggcggggacacgcgtgccctccctacgcatgcgcacccccattctcgagcggctggctcctgggggagggga

SEQ ID NO: 53071 - DNA, 383 bp, Mus musculus
  source 1..383: mol_type = other DNA
atgggtaattttaaggtacccgaaacaaatttccaacgcattgagatttccctggaagtgctacttgtttgtaccgatataaagtctttaaatttttcagagaaaacaggaagcctccgttccgcccctctggggaagggggcggggacacgcgtgccctccctacgcatgcgcacccccattctcgagcggctggctcctgggggaggggagcgcagtaacaaggagtgcgcgctgcgacacctcccagttcccccggccccgccgccatttcgtcgccgggcctaacggttcggccatcggaggccgctgcctccgacctcacctcgggccggcccaatccaggccgcggcccctccgccccgagcccgcccccgcggcgt

SEQ ID NO: 53072 - DNA, 403 bp, Mus musculus
  source 1..403: mol_type = other DNA
gtagcccctgcttcaggctgcagcctcagccaaagctccttgaaggagttggtgggggtggggtgaaagcagtggctctccccccaccccagacaggggcagtgcctctgtttaggacacagactcccatgtcccagtgagaagtggctgtgaccgccacttcgtcatgccccaaaaggagaaagtgttgacagccctttggcctctctaaagagtagctcaagaaaggtcccagattggataatgtcttagacaaagtctcaaccagaatgcgttaggcaagcctcaggccttccaaattggctttaagccaggtcagctgtgaacacacccctctctgggctgtggaccctcccacgtccggggaggcgtggcatgctgccctgagccaggctttaaatcc

SEQ ID NO: 53073 - DNA, 713 bp, Mus musculus
  source 1..713: mol_type = other DNA
cggggggctgggcggggcgccccttccccaccgcagtccctcccggcttcctccgtgcgacacccaggcggggcgcagagcccgggggtgtcgcggtgggggagggctgctgcacgcggtccccacaccaacagtggcgcagccccccgcccgcggttaaactctctggggcggcaggggagggtctgcttcagggcccggcgcgcgcggggcgagagggggagtcccgcggagggggcggggcggcagggcgctgggccgcggcgcggagaccgggtgggagccgcagccgcagcgaggccggcgggcgggagcgcacggaggtggcgctggccgggcagggttcggggtccgcgctgcgggtcccaagagtgagtgagcgagcacgcgcgcgggtggggggtgcggcccctagggatctcctaggggcaggctggggcacttagagccacccgcaggaggggggcgttcgaggcattccggtgctcgcctgaaacgtatctaccaggctcttccctgcaagtccccatttgacagatgggaaaattgaggttcagagagactaaatgattctcaaggtctgagaagtcctcgggaggattccctaatgtaggggagtctgtgtaagggcgaggtccctttccttgggccccaggctttggggctgcgagccctggagcctggttgtacatgcgtggagatgcactgtcttt

SEQ ID NO: 53074 - DNA, 392 bp, Mus musculus
  source 1..392: mol_type = other DNA
gaaaagggtcttcttgcacttaatgtaggtcattggccttcggcaaatacctagtctagagaattagtccccactgatgaccaggattattaatggtgtcatgcaggctgggagtccgcggtctccccaagggcaggcccctgggggatgctacggccccgcctcccactcggggagcccaggagggggagatgtaggcaggactcctgggttccctcctccctccttgggagaaattcctccgaggtcccctcaggcactgggcactaactaacccctggggaacctcccgcgactccgcgggtgggccggaaactagcgagttgcaccatcccgggaactccgcccatgcccagcagggggcgtgcccactccgccccgttcctacgcgc

SEQ ID NO: 53075 - DNA, 381 bp, Mus musculus
  source 1..381: mol_type = other DNA
gttgggctgagacctgggcctagggtctggtcaggcttagtctgaggctgggcctgggtccttgcttcgaaaggcaggactattaaagatttatttatttcatttatatgagtacactgtagctgtcttcagatacatcagaaaaaggcatcagatcctaacagatggttgtgtcaatgctcttaaccgctgagccctgacatgggtgatttctaacatggccctttggtagcccagcgactcagacctactaggaagcctagagtctagctctcacatcaggctctgggcacagaggatgagctgtaccagctctcactgcagcgagagccaagggagcccctcctaccactacacttgcctgacaatggaatgctgggg

SEQ ID NO: 53076 - DNA, 519 bp, Mus musculus
  source 1..519: mol_type = other DNA
tgaaatgaagaggggtgtagggagtgggtagcttccaccccaccactagccttttcctaccccagaaaagccttccacaggggtggaaagctggttccaaactctgggattcccatgagtctgggctggggcttagaatcttgccaacctccaagcttcgaagcccctagctcttcacggaggcttccagcgtgattggtagggtctctgcgagcgactggaaaagccactagcagtcctggggtgggagaggcttccttggctccgggtagcccaggccagcccccccagactcagccagcagagggcgctgtggccaaggccctgctcgggtcctgtgggcactatcttcgggacccgccggcaggggcgggtgggtgtgggatccaacaacccactagggtacctggattcccaagaccccgagcctggggcctggacgtccgggctcggatgccctggggccgggacgcctgggtcctcgcggaggagggaggcgggtcatggagccgcgggact

SEQ ID NO: 53077 - DNA, 343 bp, Mus musculus
  source 1..343: mol_type = other DNA
gccattcattgcctaatttggtatgccaatatctgatcacacacatgtatatatgtgtccgatctgtgtgcacactggtacctatagggagtgggtgtaccggtccacaaatgtggccacatctctgcgagctggaccagcaaggagagcggcctctcttgctagctattcagcagggccccttctcccggaggggggtggcggaagcgcgctcccgagcgcgggggaggggcggggcgcgcgcataggagaggcgagcggcgagcgggctagccaggtgccacgccgtggagctgcccagcgccgcccgcagatcgggagccgctcgggtccctccgccctg

SEQ ID NO: 53078 - DNA, 438 bp, Mus musculus
  source 1..438: mol_type = other DNA
tcctagaactccaggctggctttgaactttaaagatgtgtgatgcctggccagcatcatcattattttgggaaacagtctcactaaattggtttagctggtctagcattcactataggtaatccaggatggccttgaattcctgattctcctgtctctacccttcaaggggctactagagattgaacccagggccttgtatatgttaagcaggccctggactgagtattcaaactgagtctggtaacttcctctctaggagctggctgggacatgcagcacctgtagcaggcttcaacagcggccatcctggactacctatagtgaatgctagacgacagagtgccaggctgaggtcactctctcttgcccacgagagaaaatgctgagacacgattcgcagccctgcagatacagggtctgtggctgggcctctggg

SEQ ID NO: 53079 - DNA, 254 bp, Mus musculus
  source 1..254: mol_type = other DNA
ccccctcccaggagccaggaatcttacaattcttctagagggccagggccctggcgttgagaggctgagttgccagcctgtgaactgtgactagagacagaggtctcaatactttaggatatttgtcttgaaggaactgagtgacacaccatccttcaagctaggatcaggccagctctgaggttgggaggaccagggctcaccctctctcactttgaagaaatgattactaaaccctcttctattaaatggct

SEQ ID NO: 53080 - DNA, 536 bp, Mus musculus
  source 1..536: mol_type = other DNA
tacgtggtcagtgggcacacgaacaccgaggccgtccgggcagggaagaggctcagagcctgagcccgcccccaaggggcgacagaaggggcggggtccttacggtgtccgctgcctgcaccatccgcgccacgaactccgggttgaactccacggggttgatgcggacctcgtccgggtcccggaggctccaccctgaacacctgcaggcgcagcgggaagccacgcgtgcccacgccccgcacgaaccggaaggagtccacacttctcctttctaccacttccgctttgaagccgttgaactcttcgccggaccggaagtggccgacttagggagacaaggcttacgtgtaaaccggctcacctctttctgcgattgaagaaggtgtgcgagcctgagagccccgccgcgtcgtagtgcgtcacggccctgcccctctaagccggcgctgtggctgcgacgtgggacgtgcggcgtgggcggagctgtccctgcatccacctcctgtgggcagagccatctgcgggtgggctgc

SEQ ID NO: 53081 - DNA, 395 bp, Mus musculus
  source 1..395: mol_type = other DNA
tcagggcacccgaggctgccccagggagggtggggctccctggtgaaattacatttattttatattatgccatatgtttgcattgtatgtaggtgcaggcacttagatctaaggggcaaaagcaactttaccgccggcccagcatcaagagcctagggctcctgtgggctgccacgtgggagggagggctccatcagcctgggtgggcagccctccttcctgctggacagacacctggctaggaggacggctctcactggtcccggggccaggagaccctgccaccgtcctccgtcacgttccagccgcctgactcaggccgcacggggcgggctgggagccgggaggcggtgccggcgcccgctcggccccagaggcggcaccaggaagcaccc

SEQ ID NO: 53082 - DNA, 402 bp, Mus musculus
  source 1..402: mol_type = other DNA
atctctaggagtttgaggccagtctggtctacacccaattcctggccacctctctctttctctaaaaattaagtccaaaaacaggagacaggtccccaagggaccatggctctttgtaaaaccggtcaccttgatcggggccatggtcaccgcggagctgctgaagctgcgggctccgctgctctgcctgccaagcacgtcgatgcacggagcacagaactggctttgcagcccaggactcgaagccccagctcgctgccgcagcccacccgcagatggctctgcccacaggaggtggatgcagggacagctccgcccacgccgcacgtcccacgtcgcagccacagcgccggcttagaggggcagggccgtgacgcactacgacgcggcggggctctcagg

SEQ ID NO: 53083 - DNA, 386 bp, Mus musculus
  source 1..386: mol_type = other DNA
gttccccctgagctcacacttcatgactaaagagctctcaagtggccgacgagacgtccgctccgaatttgaatcctagagaaattaaagagtctatgcatggtctgcttgcgtgaggcggacgcacgtggccccgccttaatggggtggggtggggagcagcaccctgttaggccccaccccttatgcatatgcagttacataacgttcaacgccctcacagagtgagttcactgaatcttataaggcagagcaccgccctccttcgtgatgcaagggtgctccggaggccccgcccacaggaggccgcgcacgcgtgtgtatcgacaaggcctgcccgctgtcctccgggtacgcaggcgccgccgcctccctcggatatgcgc

SEQ ID NO: 53084 - DNA, 423 bp, Mus musculus
  source 1..423: mol_type = other DNA
gtaaaaccggtcaccttgatcggggccatggtcaccgcggagctgctgaagctgcgggctccgctgctctgcctgccaagcacgtcgatgcacggagcacagaactggctttgcagcccaggactcgaagccccagctcgctgccgcagcccacccgcagatggctctgcccacaggaggtggatgcagggacagctccgcccacgccgcacgtcccacgtcgcagccacagcgccggcttagaggggcagggccgtgacgcactacgacgcggcggggctctcaggctcgcacaccttcttcaatcgcagaaagaggtgagccggtttacacgtaagccttgtctccctaagtcggccacttccggtccggcgaagagttcaacggcttcaaagcggaagtggtagaaaggagaagtgtgga

SEQ ID NO: 53085 - DNA, 492 bp, Mus musculus
  source 1..492: mol_type = other DNA
aggctccggattccgggatcggacttcctcaagcctagggcgtgtgcaggagccagcggatcctggaggttaaaactctgtaaacagcttagtgattactggatgggaagaccagctccttcttcccgatcgtggaaggatggccgcccgggtgccggggcgcccaggaaggcgagccgtggggctccaggggcctctgctgccaggataggtgtgcgtacgctgccccgggccggagcgcggggcctgcagacagaagctagggggcggggtccggtgtgcggggaagtcgttgccgccccccatatggggccatctggtagccggcctgctctactctcggccgcccgccgccatccgtaacccgggacacccgccggcagcgcaccttgcggcgattctcgaagagatgcacgccgggcgcggcgcatggcttcggagtccctgccggtcgctacgcagtttacgtagcgaacggacgtccgcgcaggc

SEQ ID NO: 53086 - DNA, 459 bp, Mus musculus
  source 1..459: mol_type = other DNA
gacccagcgaactgggcccagcgccccgccgccagctgttgttgagccagccggcaggcccggctcccctgcacccgcacgagtcctcagacacgcagagtgagcgtggctgtgccctgcctcgggctcctcggggtcgccgccgacccaaccttccagaccccggggtcctgggcgactccgagacaaggccgtgccggtgtaggggcaggatctctggacccggatcccacgccagggctttcgctcttgctctcaggcatgcttggcttatttgaccaaagagccgggagtccagtggtctgcactaccgagtgcatgctcctgggtcccaagtgggtggcccactgccgtccttggctcttgtctctgcctggaggagacccggactcgaaactgcagtttgaagtctcctcccgcgagaccataaccatccgggaggagactgcccctccccct

SEQ ID NO: 53087 - DNA, 494 bp, Mus musculus
  source 1..494: mol_type = other DNA
gtcaggcctttccttcgtgggcacgggtaacctgggccctgggccctagacccgtcaggggtgtccctccctgggccagccccagagccaatgcagtggcacagagtccctggccttggttgctctgtccggctggcaggagggggagagccggccgatgcccgtcagcttaggacagcggccgctgcgggggcgcccaacgccccgctctccccctcgcggggtaagcgggatccggtcgccgggacaccgggctccagctccccggctccctctgcctgcgcggacgtccgttcgctacgtaaactgcgtagcgaccggcagggactccgaagccatgcgccgcgcccggcgtgcatctcttcgagaatcgccgcaaggtgcgctgccggcgggtgtcccgggttacggatggcggcgggcggccgagagtagagcaggccggctaccagatggccccatatggggggcggcaacgacttccccgcacaccg

SEQ ID NO: 53088 - DNA, 415 bp, Mus musculus
  source 1..415: mol_type = other DNA
aaataaatgaataaataaataaataaagagaaaagtcacttcttgtgagtcagcttaatcattaagggcataccgtgaggaacctacctccatgatgactgttggtggctgctccccaggagacctggggccaggtagggacctggctggtcctcagtgaggctagggcccaggcccctatccaaggtaagaagtactcactacacagctaggcaaacagtgtttatgagaagcagaggagaggtactcctgtctccctctcccgttaggaccgggaataggtctcaccccaagcccgatctcgaggcccctgacccgggcctgcctcaagggcgcccggccctagtgggcgacgagaactgtcacagatctgcgggtcggcctggaggcggggccaccccaagccaggtcccac

SEQ ID NO: 53089 - DNA, 479 bp, Mus musculus
  source 1..479: mol_type = other DNA
gcgctgccggcgggtgtcccgggttacggatggcggcgggcggccgagagtagagcaggccggctaccagatggccccatatggggggcggcaacgacttccccgcacaccggaccccgccccctagcttctgtctgcaggccccgcgctccggcccggggcagcgtacgcacacctatcctggcagcagaggcccctggagccccacggctcgccttcctgggcgccccggcacccgggcggccatccttccacgatcgggaagaaggagctggtcttcccatccagtaatcactaagctgtttacagagttttaacctccaggatccgctggctcctgcacacgccctaggcttgaggaagtccgatcccggaatccggagcctgcaggggtgggacctggcttggggtggccccgcctccaggccgacccgcagatctgtgacagttctcgtcgcccactagggccgggcgccctt

SEQ ID NO: 53090 - DNA, 459 bp, Mus musculus
  source 1..459: mol_type = other DNA
ccctctgtattgggggggctcccacaggggcccccaggcaggagcccccccagccaagccctgcggggggggctacagcccccaccccggccggtgcccatgggtctgccccttcggttcctcagatcactggaacacagatttcagggcacctgctgtggacacgagggttttctctggaaaaccaggatgcctgggtcctcagctccaggcctccagagctagggacgggggaggggcgcctgccggcgggaggcccattagccagctaagtgctccctgggagggcgacgtttcctgagctcattagttgaggacaagggtctgtgtcccctaaccttactgagtcagggctgcagtcgccgccccaaccgcgagggggcgccgccgtgggtcgggcggcaccatagcggtgggagggggcggcaccgcccgacggggcggggctctgcgggggcg

SEQ ID NO: 53091 - DNA, 386 bp, Mus musculus
  source 1..386: mol_type = other DNA
gcttgctgtccctaccccaataaacgctcatttgggtcaagctgcggggcgcccagggcctcgcccagcacaatcctgccagctcagaggggcgcgccccactctgcagctgggaggggcagcatccgcgcgccgccatctcagccggtgggcggtggtcgtcttccttgaggggcgtgtagggcatcccggccggcacctgggcagtgcctggacgtgtcgacccatgcgcggaagttctctcgccccttgatgaccaaggggactgtctgtttctaccttagtgacagaatgaaacagggtcagagtgatccaggcatccgacacctagaagtctaggtttgaatcctcccctatcccctttcaggaggcggggttggggagag

SEQ ID NO: 53092 - DNA, 564 bp, Mus musculus
  source 1..564: mol_type = other DNA
tcaagctgcggggcgcccagggcctcgcccagcacaatcctgccagctcagaggggcgcgccccactctgcagctgggaggggcagcatccgcgcgccgccatctcagccggtgggcggtggtcgtcttccttgaggggcgtgtagggcatcccggccggcacctgggcagtgcctggacgtgtcgacccatgcgcggaagttctctcgccccttgatgaccaaggggactgtctgtttctaccttagtgacagaatgaaacagggtcagagtgatccaggcatccgacacctagaagtctaggtttgaatcctcccctatcccctttcaggaggcggggttggggagagaagcggcagcggcggcggctcgggcggcggccgcgggggacggggagggggcggggcgcggccaggccaagcccgggggctccgcatgctgcagctgcccccgggcgcccccgccgccgccctcgccgcggagctgcgcggaacggagcccgcgagctaaccggagccagcggccgggagccagccggcgggcgtccgggaggcggcggcgcag

SEQ ID NO: 53093 - DNA, 344 bp, Mus musculus
  source 1..344: mol_type = other DNA
ctacctctagagtgttgacattacagtcatgggacagcacaccattttttatcatgtttaaataactttctcagcagtgatatttgaaggttaggatttgagagctaaacattcagaacccactaagcatagatatgcagtatgcttctcttggggtcaacatcatgattatcttccatagcctaacgcttcctctaaatttcaggatctttaggttatagacctggccagggccatgtgggggttagtcagcacggtgcctgctagaacccctccaggcgcgtgcagtcaccagcgggttttggacggtccaatgagggcgggcagcgtgtcccgccctgtag

SEQ ID NO: 53094 - DNA, 394 bp, Mus musculus
  source 1..394: mol_type = other DNA
cagtgacagtccatggtagctgccaggacctcaccatacactcgaatgcatgctgtccaatggacagtgacttagggcacctactcggagttaactgcaattccttcacaggaagctggagcaggtgcatcgcagcttcatggatgaaaaggaccggatcattgacactcgggccagggccaggtctgtcactgctctgactgagccaggggagcgccagcagaggcagcagcctcgggccaggatcatgccccaggacctcgtgaggcagcgacccccggagctcggcctccagggcggtgtgtcccctttcccctgcagcggcgggagggggcgtttggaggggaccggctccgcccccgccccgcctccgcccgcggcccggtggggagcg

SEQ ID NO: 53095 - DNA, 286 bp, Mus musculus
  source 1..286: mol_type = other DNA
gacaggggctcctcttccagaggatatgaaagaggttctggaaggccccgtggcgaagggcataggaccagccctggagcgcccatggtgctgcagtctaccgttcatgatcaagacctggataagaaccgcagggcgagacttgctcaaggtcacactggcagcctcgaggcccgagggatccggaccagaccccgggccctgaaatcagatcacagcacggctgccccgggcaccgggctggcgtatgcgttccactgcggagggcgggatccggacctgaaca

SEQ ID NO: 53096 - DNA, 498 bp, Mus musculus
  source 1..498: mol_type = other DNA
tcccaaaagactgcttcctgggctagcaagatgctgagtccagcaccaggctgtacttacgttagcaggcagatctctgagttcaaggccagcctggtctgcagagtgagttctgggacagccaaggctacacagaattcctgaaaagtctacgtttccttaggcaatttgcatcccagtgcctggcatggacatgaggctgttggaccacagaaccctcctgtttaaaggtgggaaggacttcactgctgactgtagacagtcccaggctggagccgggcagtggtggcgcacccagcaccaccagggccaggtggatttctgagttcgaggccagccttgtccagccagggctaaaagagaactttgtggtgtcaccccagcactgttcttccctcatttcctgtggtaacaaaagcaagggccccgtggagccctctgcgtgctggcagtgtgcttcctgtacccagcaacagcccgccctggggagggactagt

SEQ ID NO: 53097 - DNA, 458 bp, Mus musculus
  source 1..458: mol_type = other DNA
ctgaggttcagggtgcccaccgggtacatccacgggagcttccgctacctgctgagagcggtgcggcacccacccccagtgggtctgccagataggcttgcttgtcaccccaatctgcagcgccctgctgtcgcagccaggaggctgagctggaccagttggtgcagcagctgtggctcaggcgaacttgggagcatcaaagatccaaggttaggcaatggacgacggtcatgagccgggctcagctccactgctacctgctcctgggaaagtcccccaagagggcacagcagcagcagggacacctcggggtccatagtctgacagggcagctctggcagaggacacagatggccatcctgtagaactcctgagtgctccctccagcaagagtactgagctcagcaggcgccctggaatttagcggctggcccggcctgttcaggtccggatcccgc

SEQ ID NO: 53098 - DNA, 216 bp, Mus musculus
  source 1..216: mol_type = other DNA
taagcctgcaacccaagtagcatttctgctggcaggccatggtgaccaagcttgcagcaagcagccggtccgccaggacactgccggaaaagcggaggcctgtcgttagcccgcaatattttgggtacattccggctcagactcagggcttgtaacgctgtagttggaggcgggactcacgatgattgactgaactttaagcaggggcggtaacct

SEQ ID NO: 53099 - DNA, 388 bp, Mus musculus
  source 1..388: mol_type = other DNA
aaaataaagaagaaaaaaattatccttcttaggtcactactctagtgtttctatacacccaggctagcctcgaactcagaaatcagcttgcctctgcctcccaagtgctgtatgtggctgccttgtaagtcaggctgatccttgtaagtatgccttaccatgcctatttgacacctaggtttcttaagttggccccaccttggcaggctggaacgtgcagctgctgtggatcagaagcagacttgtcgaatcaccgagcttcggaaggttggctgcagccacactcgggaggacacagacaggctgggtgcgcacgtgtgtgctaccagtgcgtgagcgaagttccagggtgcccagcggcgcgccgcccgcggtctctaagcaggtc

SEQ ID NO: 53100 - DNA, 381 bp, Mus musculus
  source 1..381: mol_type = other DNA
atgccttttcctgcaaacgctctggtgtttgcttgtccatttctcagtcggcaaaaattagcaaagatggccactttttggcagggtctcttgtagccaagccttgcccgaggacatatagcctaaagttaggccccgtgctggaaacaggtctttacagctttagtccgcactgcagctaccgtcctgtaccttgaaagtacgcgcagctgggagttacacaacctgcgtttcaaacttcagtatacaccgcaggacggaagcgcgcgtggcgtccccccaagctctccagggcagcaggagcagcccaggccctgacgactgccaaagggagcctgttgctccacaaggaggggctcccttccgggaggagggcaatta

SEQ ID NO: 53101 - DNA, 328 bp, Mus musculus
  source 1..328: mol_type = other DNA
agccagaaaagctgagcttgttctggaagctctgcatggccaggtactccccaaacatttgttgatgatagtgacgatattattattattacacttatctgactgaactcagatcagttacacgccttggagggaagtgagatgcagatcctgggatgtggcttggcagcaaagcgcctgccaagccctggctttgatctccagtactgcaaaccaaaaccaaatgtttagctagcctgatctacattccaggctagccagggatacagggctgaagcaggagtaaccgacccttctgcctcacccacttcaacaggcctgacagctc

SEQ ID NO: 53102 - DNA, 269 bp, Mus musculus
  source 1..269: mol_type = other DNA
acagcctgggctactggagaccttgttaccagttaagctcagcgcttagaagcctctgttctgcatacacagatgcatgctgacaaaacactcataaagtaaaactatgtttttaaaactagaggtggaggtgggagcaaaggtgtctcatttctcctcccagttgtttcgaggagcgcgccaaaaacagcccaggcgggcgagggggcttgtcccgacgtcatttccgaaatacttccggctcgggcgtccggcaacttcagcgccgg

SEQ ID NO: 53103 - DNA, 413 bp, Mus musculus
  source 1..413: mol_type = other DNA
taggataatgattaaaatctgaaaattttaaatttaagactggagtgtgtgtgcccgcgctaatagagactctggagaacacctgaggtctttagttacacaggagttacaagctcctttaggacacaaacttctgtatcctctgggttcagcacaatgttagaagtcagaatgcttccagacttttggctgtgcctgcgcgcctcagcgaaggcagcccgcacttgctccaggccggcgcgcgcccggaccgtcgagggggcggggccggcgcgtgcgcgtcattcctagcgcgacgctctgccgcgccaggccttccgcgcgcacggcaaccgttccacctgcgcgccttcgcgctcgccgcccactctggtccggttctgcgccggcgcggggccctctaggacgcgcgg

SEQ ID NO: 53104 - DNA, 325 bp, Mus musculus
  source 1..325: mol_type = other DNA
cctgaaacagtgcctaccactgcagtaggcataggataatgattaaaatctgaaaattttaaatttaagactggagtgtgtgtgcccgcgctaatagagactctggagaacacctgaggtctttagttacacaggagttacaagctcctttaggacacaaacttctgtatcctctgggttcagcacaatgttagaagtcagaatgcttccagacttttggctgtgcctgcgcgcctcagcgaaggcagcccgcacttgctccaggccggcgcgcgcccggaccgtcgagggggcggggccggcgcgtgcgcgtcattcctagcgc

SEQ ID NO: 53105 - DNA, 590 bp, Mus musculus
  source 1..590: mol_type = other DNA
tccaggagtccgggctccccgtgggagggacagcgggcgggggcttcggcctgtgtgagctgcagcacgtgccccaggcggcggggacgggcacaggcgcagctcacaggcttcgagctgctgctggctgggtctggctttgaaagtctctgcccacccgggtccagctggtgcagactgcagcagttgaaagacactagggtgacccctggggacccacagcaggttctagcccagtggctccctcccatccgctttggcccccaagggcgcatgaagggggggatccccctgcggaagggggggcaggggttctccacccgggcggtcggacaggcggcctcagggcccccggggcaggccacagtaaccagagccgaccccgggcttctcctggggggcactggggtctacccaggtgctccctggggggggtacgtgcgccccattccggtcctgaccccaccccctggaggtctagccccggccccaggccccgccccccgggccctccctcccaccccagggccagatgttcagctggcggaggcatcggctgggggaggggtgctgaggccgcagccggcact

SEQ ID NO: 53106 - DNA, 289 bp, Mus musculus
  source 1..289: mol_type = other DNA
agccctggctgtcctggaactcactttgtagaccaggctggcctcgaactcaccatatttctgtgtttttaaaaagaaatcaaaattctaaagttgtctctataagcctcctttttggggtagagtccaaggactgctggagggtgctgtcctggagcaccccttctctcaccctggtctcaggaaagagagtaggatagatcctggactcaagcttgccgcagcagggcaatagcaaacagcttcattttcccaattggctttgcaatgtggcagaatgaaactggaa

SEQ ID NO: 53107 - DNA, 223 bp, Mus musculus
  source 1..223: mol_type = other DNA
actctggctacagagactggatgtgtggtagacatatgagaaattcgctccaatgtcacccaaaagactttcattctctgcgcacccaacctgcattggtactagtcacaagatgagataagggcttttaggacagcccagtctgaagtctgctcttcactctctccagctgctgttaccggcagagcaccttggggagggtggggcaacccacttccgggga

SEQ ID NO: 53108 - DNA, 449 bp, Mus musculus
  source 1..449: mol_type = other DNA
tgtggatccccatggatcaaacctcaatactgaaaaaaatactgtaccttaaaggtgtgttaagtttcaaggacgctgacccagtgcctgtccgacctggtgtctgtaaggctgacatagacttctcagttgtaggaacagctaatagcggtattttctagtcaaacaacaggtacaggacgcctgttcaagtagattcttagcctcggcagctctcgggtgttgccggaaatggctgactaccgctctcggccgagcgacggaacgggggcgtggccggtttagcacacgcggagcctcttcggctgtttccggaaactgccgaaagcttgctcctcgtggatttccgtaaacagagccgaacctcgtaggaggtgcgcgcgtccccggtcgtctgggccgagaggaaaaggctcttccccctcggctcttgccggcggaaagagccg

SEQ ID NO: 53109 - DNA, 495 bp, Mus musculus
  source 1..495: mol_type = other DNA
ggggggtgggtatgcccagggcgcgcgcgcacacacaatacggtaagtgatgataattactgttggtagcacttaaaatcagaattttgagtgccagacatttgcccattgtgacagtcttcactcaggcacgaatgccaggcagcagcgccatagcaaccggatccttgctgtgtcctgggaaaaggccacactctacgtaaattattctagaatctttgtttaggaggatccaaagtgatttttctttccctaaagcgtctagaagagatgtctccacacttctgagccttgtgttgcctcccaggcaggcagctagtcaggggcagccattggtggggatgccctaccgggtctcgctgccggcgccgctcccaggaaaactccaggcttcgccgccacgcgctgcacagggttctggcccagacctgtggctggggcggggctagttggccagcctggtctgacgctgacaatgagcctccataaaaggga

SEQ ID NO: 53110 - DNA, 823 bp, Mus musculus
  source 1..823: mol_type = other DNA
tccaggcttaccgggagcctgagacctgaaggtgtccctcggccgaagccgaattcgccccagggttttccagcctagggatgcgaatctccagctgcccatcaccagcttcgtcctgtgcaggagcccggggctgagcggagtgcctcacccggtaccctgcgggggcaggagcctgaatcaccgccgcagtcggccacctctgtttcggaacgccggctggccaggcgcagcgtgctagctctcttacagcggccgccgccctcactctggccggctccagggaaacctcgccccgccgcccctccccggtagaagccagagctgccagcgctagccccaggctcccgcgggagggggcgcggcagcccccacggctccaccctctccgcggggccgcggccatctggggcccctgccaggcgcgtctgcttggggcccgcgcccagctcctgcgggaggacgaggcaccccggagaggggaacggtgccgccgcaccgggcggtcccctgctagcgggctgcggagagccgcgctcggagatgccccgagggggcgctgaagcgcgtcgcagcggactggacacgggcgcccctggtcacctcggcgactctttaccagccggagctgcagctgcggacgcggcagggcggacccacgagggcgctgaggaccgtgctccccgcgtccgtaacaagcgcccgttgcggacttgccacctcttccccgcaccagccccccgcgagctggcaggaggaaattgcgcgcggcccctttaaatttacccaggagcccttaaaggagccccaggggccccagaca

SEQ ID NO: 53111 - DNA, 404 bp, Mus musculus
  source 1..404: mol_type = other DNA
tttggttgagggctgcaggcctattacacagccagaaggctgagccctaaagagccgggactccgcccccgctgctggagccccctcctctcagccccccagacggctgggtgcctgagaggcccgggcggcatcccgaaccggcctcggaggggccgagaccatcgccgccactaccaggagcgctggcggctggagtacctcatggagctggacggctgccgacgctgcgggggcgcgctggcctcgctcaagatgcctcagcgggccagtcaaagctctcatcgcccaggagtggagcgaaaaggccgcacacctgctggccctggggctgcccaggccggagtcgcccagcgtccctgtcgcccccagcacagcttcagcctctgaggaggggggagggg

SEQ ID NO: 53112 - DNA, 471 bp, Mus musculus
  source 1..471: mol_type = other DNA
tacagaatttgctgaatctgcaattgcactttgggtcatagattgctacttagcaacaagctttatcatcattatgtacttaaaatttaaaaagaacaaaatttgacataaattgatgtccagtttcaaatgtcattttttgggggactcatcttaggacatgaataaaattcagtattatgagtatctgccaaagtatgttttttgtagctcagaacatagctcagagaaagattgaatgagtaaggggggtctttaaatattatcaattaggatttataataaaaaatttgtagcttatgaaggctgcagtggcgggccggttctagagtttagcgaggcctgccccacccgcgggcccagtcactgcgtcctttcctgcgggagcgcagagggacagttcttgcgcctgcgcattgcgtcgctgcgcgcctccgaggccgccgcccgcgcgtccaggctctttgtgcg

SEQ ID NO: 53113 - DNA, 359 bp, Mus musculus
  source 1..359: mol_type = other DNA
aagatctaatttggtttaaatctaaaagctagaagagagtttcctaacagtcttgactacgaataatttttacctcataacctttggcataattgctcaggaagttggggtgacactacctccatctataggatttgttagaaaacagtatttagttgtggcaaattgtattttcacaatatgtcaagtatgaataaaagcatttcccaacaacttccttttgtaaagtaactttgaatcacgaaaatgagacagagactcactatgtagttcaggaaggtattgaacacctgtttctctgtgtatccctggctgtccaggaactcactttgtagaccaggctggcctttttagtaagc

SEQ ID NO: 53114 - DNA, 389 bp, Mus musculus
  source 1..389: mol_type = other DNA
aaaacaacttccttttgtaaagtaactttgaatcacgaaaatgagacagagactcactatgtagttcaggaaggtattgaacacctgtttctctgtgtatccctggctgtccaggaactcactttgtagaccaggctggcctttttagtaagccctggccagcgaggaacaccagagcccagcacgcgggccgggtgggggctcccggcgggaaccgggtggccaaagcccggccctggtccccgggttaggcgccgggcagggtcttccgagagctctacgccccggatgagggcgaacacccgggtcagaggggccccgcggcacgatccccgctccggcgcacgcgcaccgaacggtggcgggactcggccgcgtgcgctttcccg

SEQ ID NO: 53115 - DNA, 378 bp, Mus musculus
  source 1..378: mol_type = other DNA
ccagatctgactacagtgcagggcactatagcctggcttgcttggcacccaaagtgctttcagttagaacccaagtcagggtttctcattaatgctcagtagaattgcctgcaaggccatttcctggacttcactcgagctttctccagtaggtcctggggagatcaggtgaggtagacctgcccaaccaggaatttaggctaaagttgaggaggccaggcctagaggcctctggtcacccttgtgacaccgggatgaacaaaaagagcagaggctgtgttccctctagccagtgctgctttgtctgagaccaagggagccccatttgcagctaatgctgggggcggggcctcttaaggaacctgcacacgtgtacac

SEQ ID NO: 53116 - DNA, 351 bp, Mus musculus
  source 1..351: mol_type = other DNA
acagagactcactatgtagttcaggaaggtattgaacacctgtttctctgtgtatccctggctgtccaggaactcactttgtagaccaggctggcctttttagtaagccctggccagcgaggaacaccagagcccagcacgcgggccgggtgggggctcccggcgggaaccgggtggccaaagcccggccctggtccccgggttaggcgccgggcagggtcttccgagagctctacgccccggatgagggcgaacacccgggtcagaggggccccgcggcacgatccccgctccggcgcacgcgcaccgaacggtggcgggactcggccgcgtgcgctttcccgccctcgt

SEQ ID NO: 53117 - DNA, 389 bp, Mus musculus
  source 1..389: mol_type = other DNA
aaccagaacatgtttttgtgtttaaaagctacactgaacacccactgtagttgacagccaggctaataaagactttctatatggttgtgagccaccatgtggatcctgggaaccatccggggccctttgcaagagctatgtggagctagcctcacagagatgggcctgcctctgcctcctcaactacatctggctattattatcatcatcatcatcattatttattattattattttggagagaagaacttatggcaatccgcttgtcaaatgctaggatttcaggcatgtattactcttaaaaaatagccttttggtatgattcatgtacaaagattaaatgtaattcgacataacatgttgcggggtgatctggctcagcctggact

SEQ ID NO: 53118 - DNA, 349 bp, Mus musculus
  source 1..349: mol_type = other DNA
aatggaaagtacatgactttgtagagtgcaagtttgcgtggatagagtcactgtatgtaatcccttgagctcaggagttcaaggcctgcctgcctaaacattgtatatttatttggctttcatttcaaaaagatttatttaatgtgcatatgtgttgtccacatatgtctgtataccatgtgcacgcctagagctagttctctgcaagagcaacagatgctctgagaaattgaaattcccagctccagcggcctcaggtgctgcctctcgtgactcatgaatgacctaactcctgcgtggcgcgcgcgccctcattccgcgcgtcccgccccacgcgctctcggaggcg

SEQ ID NO: 53119 - DNA, 463 bp, Mus musculus
  source 1..463: mol_type = other DNA
atgccccagtacgcatttgaaaattgaaatgtatataaagaaaatatctaatttttttaaaaaaagaatttgaaaaaattaaagttgcactttcaccctctgaatggcatgaattaacctaacaaagatgaagacatgcacattccatgtattagttatttttctattgttgtgacaaaataactgaccaaagcaagttaaactttagtgacacatctctccaaaatagtaaccttctgggaattatcattcaaacacaatacttccaaattttaacttctaaaggttttcattaattcttttgcacaaattcagtactaaaaaaaaaaaaaagcatgaaacatagtaagttaactctggaattttcagagaatttgcagatcaatgtccacaggtggtcatgaggctatgcactgccagactttctcacaaagtaaacctttaacagattcaattacagaaa

SEQ ID NO: 53120 - DNA, 560 bp, Mus musculus
  source 1..560: mol_type = other DNA
ggcctcaggtgctatctgatggcactcttggacttttagttgttagaaaataggagtccatttatacatcccaaaggctttgctaatagtgttaaaactgtttggtcacatatagtgagctacaccattgaaattctaaattttatattaacaggttttcaccaggaaatctcattctcatgtatgtatgtatgtatgtatgtatgtatgtatgtatagagatatatctgtatgccacacacatacagatgaatttaaaatagcagaatataatgctctgtatcataatgcatttttgcactgagaccatattttacattagaccacaaaaaaacttctataactttaaatagcttgtttacagtagaaatgaattgaattgtaccatagttcatttgcattaatttccagatttttttcagtaactgttaaaaaaattaaaaattaagtaaaacacttttaagaaatattgtagttcctggtaacatgccattaaacagtttcactctggctaattttcagggaatttacaaatcattttccagaaatgatatttaaag

SEQ ID NO: 53121 - DNA, 269 bp, Mus musculus
  source 1..269: mol_type = other DNA
aataatattcggtagaattctgtaccaaagccatctgacccatctagagtagaatctgatgatattttgaatttccttatgatgaatttccccaagaaacagtgtctactcatatttaagtatcaattatatcacaatttacaaggtgctaatacaataatttctgagccaattgataatgataaatgccttattcaataactacttgtaggtggtaaatgccacgcctaccctgtactaatataattggaaagggaaaattctgcaaa

SEQ ID NO: 53122 - DNA, 417 bp, Mus musculus
  source 1..417: mol_type = other DNA
aagaaaacttttaatttagagcttgcttacaggtatttgaaacagcatgtgaaccatgcttcatcttaaataatttaactttaattctttttgaccaggctagtctggcattaattctttttcttaactcttttaaccaaatttaatactcaacacaacacactgtaaaaaataaaatggttcactttgaattcttttattttttttagaatttacatttcaaatcccctatactggggcatagtttaaattgcacattctgtggtgcattaaatgtaatatgttaactcttttattgtttgaagaccaatgtccatagttgaccatgggaattgtgtaagcaaaattcctttaaaaataaatcattaacaaatccataataaaacattagtaaaatgcttactgactttaaaataa

SEQ ID NO: 53123 - DNA, 563 bp, Mus musculus
  source 1..563: mol_type = other DNA
aaacaaatgtgtctgggaggaacattcttatttgaaacagcttttgtagttttgcattaactaatttaactttaattctattccttaactcttttagcaagctttaatattaaacacaatacattgaataaaaaacaaaatgggtcaccttggagccttttaaattgcatgttctgaaaggcataacatgttatagtttaacttttttatttgaccacggagcattgtgtaaacaaaataccttttaaaataaatctttaacaagttcaattgctgaaatagaaacaattgttgattttaaaagaaaagttcattactaatggcatggacattttaaacttttgttagctcactaaaggataatttttctatgttagggtgtctttgtgaaatataatttttaaatgctttgtactaatacttttctatagtaaagtattatttgaagaatctcatcgctgctgaatccccatctttgacaatgacactgcctctgataatgacaataggatcctgagccaagatgacctcaggatctctattccagactggagaaatttgaa

SEQ ID NO: 53124 - DNA, 566 bp, Mus musculus
  source 1..566: mol_type = other DNA
gtcaagttgacacaaaaatatgctcgacttacaacattgaaccatttttctagtccaaagtgcccaaaatttcaatatttctccaaaaatttggatagtcaggcctgtaataccacactttgctttaattttctatccaaaatacttaatttagagcttgcttacagtgtcagagtgtgagtgtcagagcttgccatagaaaggagcctggcaacagtctggcagatagtattattaggaatataatcttccggtcacaaattttaatctctttttgaaacagcatgtgaaccatgcttcatcttaagtaatttagcttcgattcttctttttaactcttaaaacaaaatttaatattaaacacaacactttgagtaaaaactaaaatggttcactttgacatcttttaagttgcacattctgtagtgcataaatgtaataggttaactcttttattaattttttaagatttgcacagtaagcaaaattccattaaaagtaaaattttaacaaattctgttgcagaaataaaacattagtagaatgcttggtaactttaaaagaag

SEQ ID NO: 53125 - DNA, 590 bp, Mus musculus
  source 1..590: mol_type = other DNA
cccattttctctgtgataactccagctgtgtcaagttgacacaaaacaatatgctcgacttacaacattgaaccatttttctagtccaaagtgcccaaattttcaatatttctccaaaaatttggatagtcaggcctgaataccacactttgcagttaattttctatctctgtgaagagacaccataaaaaagaaaacacaaaatacttaatttagagcttgcttacagtgtcagagtgtgagtgtcagagcttgccatagaaaggagcctggcaacagtctggcagatagtattttgaaacagcatgtgaaccatgcttcatcttaaataatttaacttcgattcttcttcttaactcttaaaacaaaatttaatattaaacacaacactttgagtaaaaaataaaatggttcactttgacatctttttaattgcacattctgtagtgcataaatgtaataggttaactcttttattaattttttgaccatgggaattgtgtaagcaaaattccattaaaagtaaatttttaacaaattctgttgcagaaataaaacattagtagaatgcttggtaactttaaaagaag

SEQ ID NO: 53126 - DNA, 332 bp, Mus musculus
  source 1..332: mol_type = other DNA
gtatggtcacacatctgaccacagacagctggtgggaacctgagctcagcttcagcttaaagtcccaaattaaaaatacattgaatgtgtaagatttcttaagtacataatttctttaaaaaaaaaaaagtcaatttgaacacattaaatttgctggagcaccaactctattatatacttgatgtagagatgttgtgtactcaatatactattaaatattttttttttttcaaagccactttaactaatgaagagaaagggatcaggaacccatgcacatccgctgggggccgggggcgctgcccggatacagcggcccctcactagaagcc

SEQ ID NO: 53127 - DNA, 489 bp, Mus musculus
  source 1..489: mol_type = other DNA
gatctataaaaaaaatcaggcattagatgttaaataataattgaccataaagatttattaaatccttttagaattattatattttgattatttatattaataatgatgttacctgttctgtttgtaatttactgaatacatagctaggtttttaatgtataaaatcccaaaatacactcagattcaaactgcctctgtgtttgtttctgttccagggacccccccacccgatggggtggtccgtgtttcaaatcagtgtataattttaaatataaacatggcctgttcaatatcagggctacacttttttaaaaaaattaaccatcaatatgacattcaggtttatgttttctctggtgttataccagaagacagactatggtgaaaaaagacaggaggtcccacctttccccttctgcaggaatactcacagggttaatccttctgacaccaagtcacactttaactcattgtcatcaggacaaagat

SEQ ID NO: 53128 - DNA, 465 bp, Mus musculus
  source 1..465: mol_type = other DNA
ccttttagaattattatattttgattatttatattaataatgatgttacctgttctgtttgtaatttactgaatacatagctaggtttttaatgtataaaatcccaaaatacactcagattcaaactgcctctgtgtttgtttctgttccagggacccccccacccgatggggtggtccgtgtttcaaatcagtgtataattttaaatataaacatggcctgttcaatatcagggctacacttttttaaaaaaattaaccatcaatatgacattcaggtttatgttttctctggtgttataccagaagacagactatggtgaaaaaagacaggaggtcccacctttccccttctgcaggaatactcacagggttaatccttctgacaccaagtcacactttaactcattgtcatcaggacaaagataaggaggggcagcccaccagcccgctgtctcgccacgct

SEQ ID NO: 53129 - DNA, 239 bp, Mus musculus
  source 1..239: mol_type = other DNA
tcacttgtcaaaattagccaattccacagttggggctgcataatgacattgcactgcccagcatgcgggcatgtcactccgtcccagggtgggtgagccagccctctgggtctggtccaagttggaacctctcacgtgaggcccaatgtgtcattttgctcccttcaaagtgggtgcccttgtggacaaggggggcacactccaggacttcctccctcccccccaaggctggcgtgcca

SEQ ID NO: 53130 - DNA, 292 bp, Mus musculus
  source 1..292: mol_type = other DNA
cccaggggttgtctctatctccaaggagactctacacagaaatccgctcgtacttcccaggtacacacctgtgaacctaaatttgacaagcagggaggagagcagtctgtctgcctgtctgtctgtcttcacttgtcaaaattagccaattccacagttggggctgcataatgacattgcactgcccagcatgcgggcatgtcactccgtcccagggtgggtgagccagccctctgggtctggtccaagttggaacctctcacgtgaggcccaatgtgtcattttgctccct

SEQ ID NO: 53131 - DNA, 346 bp, Mus musculus
  source 1..346: mol_type = other DNA
ttaagagcactcactgctcttggtggctcgaacagctacagtgtagtcacatataataagtgagtaaatagttcttcttctgaaagctacagtgtagtcacatataataagtgagtaaatagttaaaaaatagtaaatagttaaattcccagtaatccaacattcttgctagtaactagggtaagataataagggtagtgaccacttcaattctgcagttgaattttaaaatcaagaagaacggattagagttgatcctatgcagttgactgcaggaattaaattccttcccagactcttgcaggaaagaggcggaccggggcggagtcctgggtcacttccccgc

SEQ ID NO: 53132 - DNA, 298 bp, Mus musculus
  source 1..298: mol_type = other DNA
atgcataaaatgagggttatccctaacttttaggagtgtggaacagcctcagtagtatagcacttatctacacatgcacatagcagcagctttaatctatagcactgctaaaagctcagcccagggcccagtacctgagtcgcccgcgccccgtctgcgcgctgggcggctggcggggaacggcctagccgcagcgccaaaggcgtagcgtcgcactcccctaaagcgcctgcgcctctttttcgcgctgcaaaatcagaggcggagctctccgcacgcaaatcccgtgggcctttgc

SEQ ID NO: 53133 - DNA, 332 bp, Mus musculus
  source 1..332: mol_type = other DNA
tagtgctgacagacagattgtaattctgtcctgatggttgaaaataactacttgttactcttccacaatctcatgtttctatgatgaatcaaactagctcccttatatccagccttgaaatctgatttttctcagaatgatgggtgtcttagtaatgctttttgtagtataaggttgaatatataatacttagacctagtaggaaattttttatgctaatactagcatagtattaatactagcataagcttttgtaaaagaagcttaagcattaatggcccaaattgtttgctattttgtaggaaagttgaagcatatcttcattttcaata

SEQ ID NO: 53134 - DNA, 356 bp, Mus musculus
  source 1..356: mol_type = other DNA
tactgatatgtaagtgatttgaacagtaactaactacatattcagtggctggttagctaacccttcaaagcccctattagcctcatgtggcttggacagagtcttgaggatacacaggatccgcaatccacgtgggctagagcataaggtgagcgcccaaacctttggcacaaaaccccttttattttacaggcaggccggggctttctctccttgaggagtcctcaagcctttacaggctaatgtccttcttgatcatcaggatgagccccaagaaccggcctctttggaggcagctgccaagcggaagctcccagatttggtaggtgggaggggttccctcacctagctgcggg

SEQ ID NO: 53135 - DNA, 377 bp, Mus musculus
  source 1..377: mol_type = other DNA
atttaaaaaaaaaccatatttacgtgactgggtttttaatgtaaaaaaaaagatttatttattacatgaaagtacactgtagctgtctttagactttaaagaaataaaatttctgactatagccttaatttgagcaaataaaaatcaaggtctctacttttcaagaagagatggttccagaaaatagagaataacttctgaaattcttttaatagtgtgggatataattaacacaaaatactgtgcagccctggctgtcctggaactccctctgtagccctggctgtcccggagcccacagagatcagtgctgagatttaaaatgtagtgagagacccgagttgtcagactgaatccggcgctcgctgatgatgcag

SEQ ID NO: 53136 - DNA, 319 bp, Mus musculus
  source 1..319: mol_type = other DNA
cctgatcaccgtgctgtggtatccatgttcagccgtcgggagtcctcgaccctggtcttagttaggcctaggcttccagctttaaaggctctgagaccacacacaggctctttaaggcgcctctaacccagcgttctcgcacttcaggggcggcgtcgcttacaagtccttcgaggaggcggtctgtcgttcggctcagctccgggcagcggcttgacggggagccaggagtaagtcctgctggcggctccgcgacttccaacaggcggaactttgacggaggtgggacttcctgtttcaaataaacacttttaagagg

SEQ ID NO: 53137 - DNA, 248 bp, Mus musculus
  source 1..248: mol_type = other DNA
cctctttggaggcagctgccaagcggaagctcccagatttggtaggtgggaggggttccctcacctagctgcggggggccatgggctgctgtcagcctgatcaccgtgctgtggtatccatgttcagccgtcgggagtcctcgaccctggtcttagttaggcctaggcttccagctttaaaggctctgagaccacacacaggctctttaaggcgcctctaacccagcgttctcgcacttcaggggcgg

SEQ ID NO: 53138 - DNA, 508 bp, Mus musculus
  source 1..508: mol_type = other DNA
agctacctacctagctgacctgggttgactgagtgaagatcaaggcttaaggctcactaggacaaagtattgatagtaagactaaagcttttttattttattttatgctctggctgttctagaaatttctatagagccaagacttttttttcattagtcaatttaaaagaccttttttcattagtcaatttaaaaacctacgaaggacaggatttcgtttaattcacagcggctggcaaggaactgagctgcgacttactcgctgccgggatcccaccggcggggactgtgggccgttactcccgttcagaggccaggggaaggcggggccggccgataggccatccggccggagctccggccgtgggcgggcctcggagggcctggccacgcccccgagcggccgccctgcttctgcgcaggctcagagagcgcgttcacgtcccgcggcaccgcccacatcctggggacgtcggcggcgcgcgacgtgcttcgccggataaatgcg

SEQ ID NO: 53139 - DNA, 370 bp, Mus musculus
  source 1..370: mol_type = other DNA
ttaaaagccttgcccagctggaacatagtttttaaaccgtgtaaatccttccctaccagttaaaactacacgttggttgtttttggtaaacatatgtttcatttgtacaataaacttaatgaaaaacagacaaccagatctgctcaggggaattttttttattgctaaaaatggatctcttgagcctttactagcctggtctacatagagaatgccaggactgtgactgaggaggaagggctgcttcatcctcctcacctaccttctggaagacttagagaagacttccggaagattgagcctcatggtgccaggaagccaaaggacttaggtgctctgtcctttactttttaagataaagagtgagtcc

SEQ ID NO: 53140 - DNA, 595 bp, Mus musculus
  source 1..595: mol_type = other DNA
agcccaaccgcggtggccttggcgggagagggtaccgtcctgcggaggacctgccttgggacagccttctcctacaagaatctccccccgggggcagctccgaaacaggttttgggtctggtctcccgccaccatcaggggttgcgggaccagaggacccttcttccttgaccccactggccagcctgctcccaacccggaaggagcctgcggctgccccggattcggtgcggaaaatgccgcagctgactgccagcgccgtggtcagccctcagggtgacgaaagcccgtgcggtgggactctcgccaccgccaccgccgcctcggagagcaggccgctaccgcgcgtacaccgggcgcggggtgctcctcgtcagcagggccccggcgcgggaacgcgagacgtcttccagaagagccgcttcgcgccccgtggcgccccacacttccggtttataatcgcagggcgtcaggccgggcggcgctgccgcgggcgcctctgggcccctacgtgcagaagctgcccatgatcggccgtaccggccgcccggcccgccgctgggcgctctccgactggccacacccggaagtgacg

SEQ ID NO: 53141 - DNA, 475 bp, Mus musculus
  source 1..475: mol_type = other DNA
tttgtctatcaaatgcaaagctgtaggttggatcacctaaaccacagtaaataaattttactttcttagggtttcctatatccaaggttagccttaatcttgatatttagtcaaggataatactgaactagttcatgtcctgcaagtactagacaagcacttaagcccaacaaccttatttgcaagtacaagcacacatacagaattaaactttttttttaaaaaagatttatttatttattatatataagtacactgtagctgtcctcagacattccagtcagatctcattacggataaattttttttttaagatcagaaactagaaagcggtatcacacacctttgatcccagcatcctggaagcaaaactctaactaacccaaaggagctgttgctttaagaagcgccactcacgtgaccaacgtcgccctagtgactcagtagacggccaccgattggctccgcatatgga

SEQ ID NO: 53142 - DNA, 387 bp, Mus musculus
  source 1..387: mol_type = other DNA
actggtaccttctgaggctacgagaagatttcaggtccccttagagctggtctttgagagctttatttttatttacatgtaaaaaaaaaaaaaaccgttattcttattttatatgtgtgcagagggcactggatcccctgggtgtatgtgtgtttgggtaccactcacatgcagtgctggctagaggagcaagtgctcttaaggactttcttcagcccccaaattaaataataataattttttggttttttttaaatatgtgtaaatgttttacagggttgtatacacagcccaggttaccctggcttagccttgtaaaagtcagacctaaaataactcacattttttggttggttttgctgaggggcggggcttcatgtatccccg

SEQ ID NO: 53143 - DNA, 352 bp, Mus musculus
  source 1..352: mol_type = other DNA
aactgtcgaccgagcccgaccgcgcaggcgccgccgccgcccgcctccgcctcccgcgccagcactgagcccgcgctagcaagcgcacgcacacagaggcagaggccgcgctgtcttcgcggctcggctcactgagcgcaactcgaccgcgggggagtgcgcgccgaggacgacggagttccctcacttcccctccctcctctcagagcgcgcagccgcacaggggcctgagtcgggcaaggctggctgcggctcaagtgccagcacggaagcgtgagcgcgctctgcgcagtcgcgccggagtccgaaaggcctttgagggagagagcaatgccgggacctctttctgtgc

SEQ ID NO: 53144 - DNA, 338 bp, Mus musculus
  source 1..338: mol_type = other DNA
acctgattgatatacatatatatatatatatatatatatatatatatatatatatatatatatatatatatatatatatatatatatacccagaattctataggtggagggagctccatctatatggctagctgggtaaaccctttagccagggacttctgaagtggctcaagttctcaggggcccaaggtactagtggcatagtacctttagaggtagttactaacaccactactcagcaagagtgaactgcacttttggtccgcagcagaaacaggctgtatactcccgaatacactatttcccttgggtggcagggattgcccatttggagaagc

SEQ ID NO: 53145 - DNA, 202 bp, Mus musculus
  source 1..202: mol_type = other DNA
acaaacatttgttgatagtctccagtcggcacgcacagaaagaggtcccggcattgctctctccctcaaaggcctttcggactccggcgcgactgcgcagagcgcgctcacgcttccgtgctggcacttgagccgcagccagccttgcccgactcaggcccctgtgcggctgcgcgctctgagaggagggaggggaagtgag

SEQ ID NO: 53146 - DNA, 419 bp, Mus musculus
  source 1..419: mol_type = other DNA
tcttgagagatgttttcagttaccttgaggagaaaataaaaaatcaacaagaaaacaaatttattacttatttagaacacatttgtgttattacatacactcagagatccatctgcctctgtgtgtgtccaacacctccggagtgttggtcaccacactgagttccagattctatgggacagagaacctgactctgactttgagagaggatcgcataagggatcgttccctattgggaacgctggctcggcgcgtgcctccatgcgggtacgaacaggcagccgccggctgccgcgccgagtcgccctgtcccgccccacggcctctcgggccacctccccccggggctgctgtccctgggcctgcggaaacccaccccggcttctgagcgctcgttttaacaaccccccactgggggc

SEQ ID NO: 53147 - DNA, 412 bp, Mus musculus
  source 1..412: mol_type = other DNA
gcctttaatcccagcattcagggaggcagaggcaggcggatctctgagtttgaggccagcctggtctacaaagtgagttccaggacagccagggctatacagagaaacctcttgagagatgttttcagttaccttgaggagaaaataaaaaatcaacaagaaaacaaatttattacttatttagaacacatttgtgttattacatacactcagagatccatctgcctctgtgtgtgtccaacacctccggagtgttggtcaccacactgagttccagattctatgggacagagaacctgactctgactttgagagaggatcgcataagggatcgttccctattgggaacgctggctcggcgcgtgcctccatgcgggtacgaacaggcagccgccggctgccgcgccgagtc

SEQ ID NO: 53148 - DNA, 253 bp, Mus musculus
  source 1..253: mol_type = other DNA
cctgccagcatgagactagatttctgatggtggcatcgtctggataacgtcctccaggatttgaatagtagtaatccactcaaattacatgaaaaatttccaatcgatctcgtggcaaggtgccgctgatcacccattttcctagctctgaagcagcagcccagctgatgtcagactccgcagtggggacagactctaatgcaggggctgtcacaggcccagaccaccccatttgagagtgactcccccactg

SEQ ID NO: 53149 - DNA, 389 bp, Mus musculus
  source 1..389: mol_type = other DNA
actttgctgacaaagcccagtttctgccactgacctcagcacagctgagccctgatgggagccagggtcgcacccacctttatgcacaagctggcctcaatctttgactaacgggggtctcccctttcacttttttttttttttttttaagtagggagaatggagaagataaaatgaaatattctcctaacccctcaaattatacaaacgatttaaggattttaagtctttgagccaaatatgttgaagagaaaaaaagctgctttctactcacctgaaccaaaccctgcctcagataggtgccccaccctgccttggagctaaaaatatccgtagcactgacagttagtctcagtctccacagcttaagttctgcagtgggggagtca

SEQ ID NO: 53150 - DNA, 242 bp, Mus musculus
  source 1..242: mol_type = other DNA
ttcagagctaggaaaatgggtgatcagcggcaccttgccacgagatcgattggaaatttttcatgtaatttgagtggattactactattcaaatcctggaggacgttatccagacgatgccaccatcagaaatctagtctcatgctggcagggtaaggctctctgagctccagttggactcctacaggcctcacttaactaaagtgcattttacaggctctgccctctatgcaaggctcagc

SEQ ID NO: 53151 - DNA, 354 bp, Mus musculus
  source 1..354: mol_type = other DNA
gccttggctgtcctgaaactcactttgtagaccaggctggcctcgaactcagaaatccgcctgcctctaaaggcatcttttttattattaagttttaaacattcttagaggctggcctcaaacctttaaggctctaggaagaaaccctgtcctggccagtaagaggccctcaggggagggggtcagaggagggcgtgcccggagagcatctcccttttctgtccattgggaggcagaagacaggtttttaccaaaacagctttttgtaattcatcctggcctccagctgaaaccgcgtgactcagtccctctgagggaaccagccctcttcttggcacacaggggctaggtgat

SEQ ID NO: 53152 - DNA, 315 bp, Mus musculus
  source 1..315: mol_type = other DNA
aggcagactgatatttgagtttgagatcagtctctaaagccagatccatttagactctgataaataacttactaataatatatataagagttattctggtgtggtcatctgtctggtcttggtgccaaaagacaggtggcgacacactctgatcccagtactgcgctccggagattggattgcaggccagcctggtctacagcgcgaagagagataaacttttactgtttatccagaggacaactaacaggaatcctttttcctctgcctaaaagcctgcaaaccggctcaagcctgtctggagcttcaggaagg

SEQ ID NO: 53153 - DNA, 307 bp, Mus musculus
  source 1..307: mol_type = other DNA
tacttgcaggatataaatacctttaaagtaataaaaagctcagctgttgagaattctagctgctcttccagaagatctgggttcaattgtaattgggcgtggtcgaggtcagcctggtctacagagtgacttccaggacgtggcgcacgcctttaatcccagcacgaggccagcctggtctacaaagcaggacagccagggctaaaggagttgggaaatccatcgtcaccccggctctttatttagggagtacacagactaaagctctgtctttcctctttgtggaacatcatgctttcctcagcat

SEQ ID NO: 53154 - DNA, 389 bp, Mus musculus
  source 1..389: mol_type = other DNA
tgttttgaaacaaggtcttccaatgaagacttgattggcctccaaatcagaatctttcagattcacttttcttaaatactaagatttcagatgttagctgttatattacattgtatacttaaaacagtagctgagcagtcctttattaatttgaaacttccaagggtaaaagcactgactgctcttccaatgctcttctggtgtgtctgaagacagctacagtgtattcatatacataaaaggaagaaaactggcaatgcttttttggtttggaaaatggcaattgaaatatccatagcaaccatgcactctttgaaagcaaaggtgcttagcgctgattttcatccaacttttaaaaaaatttcccccgcccctctcctaggtcgctc

SEQ ID NO: 53155 - DNA, 208 bp, Mus musculus
  source 1..208: mol_type = other DNA
tccacagggcatgcctgatactcataaagatttacatcctggttgagattgaccagagatctttagtgaatagtcactcacagactttattgattcaataataaacagcaaaggttaagtgttccggcgtctggccctcattacggggagcgggaccgcacgcccggtccccgtcccgcctccaagctgcgattggttcggaggcatc

SEQ ID NO: 53156 - DNA, 426 bp, Mus musculus
  source 1..426: mol_type = other DNA
tagcctggctgccctgggacaccctctataaaactggcatcttatggatatgaatattttgccagcatggatgcatgtgtatcatatgcccatggaagccctggaattgcaattacagtttgtgaactagctgccatatgggttaagaattgaactctagtcctctgcaagaatagcagttaagtgctcttaactccagctccaggaggtctgatgacctcttctagactgagaataactcatatacatatcatttagaaataataaaaaacatgttgatcttccttccttttttgtttttcctgactgttctagaccaggctggcctcggaacttcagttatactttaacagattattagattgcaatgtagaagaaagcctcggaagctttcctatgcctacgaagcccctggggggtgggtgt

SEQ ID NO: 53157 - DNA, 415 bp, Mus musculus
  source 1..415: mol_type = other DNA
ctggtgctgagctggcctggcccccagaggatcatgcacgagccaccgtggagcgggatctcgtaggcgcttccgggaagcttttgaagctggtagcagctgctcccccagccctgtgctactgctccgtgctgctgcgggggctgctggctgccctggcatctggaggcatcctgtatcctggtggctgtcatggctgagggaagcctcttgccaccagccctgggtaatatgcacgaggtatttagccaactggcagggcccttcatcttccgaggaccacatctgtctgtgctgcacagtgtcctcacgtaatgagtggtttcaaaccccaccattttttctaaataaaatttgccgagttgagacaaacagtccagtgtttcgtccggccgcgctctggacgagccaatcg

SEQ ID NO: 53158 - DNA, 430 bp, Mus musculus
  source 1..430: mol_type = other DNA
cggaaaatctagaaggaacttttaaaaattgtcccatggtaatgacataattttggcctaaaattggaaatggttcaacagttagagcaccaaacctgaggctgttttcaaatcctatttttaatgatgattcttaaacactccaccacccaccagaggttgtggaaaatggcagcttgatccactcagacatttcatgaatctatcacacaactcctaacggcaaaattacagttttgaagtagcaacaaaatgaattttatgatgttagagggtcccagtattaggaaatttcactcattggttgaacaagtaatgaacaaccgtttctttaagcagccaatgctgagcaagctcttggtcagcctgccacgaccgcttgacccagctggcctaccaggaggcgggaccggaagctgcctgtgggagg

SEQ ID NO: 53159 - DNA, 591 bp, Mus musculus
  source 1..591: mol_type = other DNA
ttacccagtgtgacacagtggtctcctaggaaggatgctcagagcccccgaggcgcaggagcacgcgagcggtccagcactagcagtgcccgtccggctggcgctcagggaatccaggccacgccggccgccccgccccgtactcaccgggccccgcagccccgtccatccggcccccgcgttgctccgagcagcgtcgtcggaggcgtctaagccgcgggggccatgggcactcgagcgcgcgcggaggggagccgtgccacccctcgggggcgctgacgacccggggtgcggtgacgggccgtccggagcccctgcgctgcagcacaaacaggcgcgggaccgggccggagggggggggcgggccgccaggtaacccttccctgtccgggacccgaggctcaggccggaggcggggacacacggctgacccttcaccccgccaggctcttgcccggcttccggcccgcaggctcccagaggacctgggaggggacgtagagcttgagatctgggtctcttaagcctgaagcccacgaaatgggccttaagcccgggggcggggcctttcctaaagggcaaggctaagaa

SEQ ID NO: 53160 - DNA, 630 bp, Mus musculus
  source 1..630: mol_type = other DNA
tcctaggaaggatgctcagagcccccgaggcgcaggagcacgcgagcggtccagcactagcagtgcccgtccggctggcgctcagggaatccaggccacgccggccgccccgccccgtactcaccgggccccgcagccccgtccatccggcccccgcgttgctccgagcagcgtcgtcggaggcgtctaagccgcgggggccatgggcactcgagcgcgcgcggaggggagccgtgccacccctcgggggcgctgacgacccggggtgcggtgacgggccgtccggagcccctgcgctgcagcacaaacaggcgcgggaccgggccggagggggggggcgggccgccaggtaacccttccctgtccgggacccgaggctcaggccggaggcggggacacacggctgacccttcaccccgccaggctcttgcccggcttccggcccgcaggctcccagaggacctgggaggggacgtagagcttgagatctgggtctcttaagcctgaagcccacgaaatgggccttaagcccgggggcggggcctttcctaaagggcaaggctaagaactgaatcggagcctgcagccctgttgaagccaggctgggctgactcagcatcctgcctgccc

SEQ ID NO: 53161 - DNA, 342 bp, Mus musculus
  source 1..342: mol_type = other DNA
cgggtggtggctgtggcagacgacttctgcaaagtacacctctcttcaggggaccattgggcccagccatgtctccttaggtggcaaggatgctagcatctttcagtggcgagtgctgggggcagggagctctgggcccgctcctgccaggccccaccctggccaaaaccccccaaggacagctggctgagccaggcaacccctggtgcttttgtcgcaagaagagtgagggcgcgcgcgcgcctttcgacgccactgccggggagctgctaggacttccggctcctcaccgccctcaggggcggggtcgaggcggctagcgaaaggagccgagttccttcc

SEQ ID NO: 53162 - DNA, 209 bp, Mus musculus
  source 1..209: mol_type = other DNA
ggctgataatcacagcacaagctgctgagctctcacctggtagctggttggggatctgctccaccctctgcgtctattcgcagggaaggacttctgctgtcaagaagcaagcacgcctttgtggctgcttaatgaatattcacgattcgaagggcggcctttcccgaaagtgttttagagtggaactctcacgacgtcacttcctactc

SEQ ID NO: 53163 - DNA, 598 bp, Mus musculus
  source 1..598: mol_type = other DNA
gtgagccaaggcagcctccaggccctcctccagtccctggttccagggctagccccagggcaagggtcagcagccccccacctgcagctgtgccaaccgctagcagtggagtcaagacccctctccagggggggtattgagctgcatccagacttgcccggctggctagccctgtgcctagagccaccgttcccgctgccagggcagtctggggcagttggaggggcagcaccacgggcagcaccggcgccatctcccatctctgcccaagggagtgagaagccgtcggggcaggcaggatgctgagtcagcccagcctggcttcaacagggctgcaggctccgattcagttcttagccttgccctttaggaaaggccccgcccccgggcttaaggcccatttcgtgggcttcaggcttaagagacccagatctcaagctctacgtcccctcccaggtcctctgggagcctgcgggccggaagccgggcaagagcctggcggggtgaagggtcagccgtgtgtccccgcctccggcctgagcctcgggtcccggacagggaagggttacctggcggcccgccccccccctccggcccg

SEQ ID NO: 53164 - DNA, 290 bp, Mus musculus
  source 1..290: mol_type = other DNA
agaccattacgaggcctagggagtgccacctccacgaggcaaaggcactgatttctgagaacaccacaaatttgggttttgtcttttctatcctttaacgtgaaagagagttcaaaagtcaagatttattttcaaatttggatatgtcctctggggcgcagccaagccagttttaacagcacggacgtgggcccctaaattgccaccccttccttaaggcagttcctgtagccgattggtcggcgacgcgggcggggcaggatcgtccagtacgcaggcgcccgctgcgg

SEQ ID NO: 53165 - DNA, 181 bp, Mus musculus
  source 1..181: mol_type = other DNA
ctttcttggcaggactcaagggctgctcgcgtaggaacaggccaagcctgcctgagggaagtctacagttgcttcctggaacagaggacacagttgtcttctacaactccacaagtggcctcagtttcaatgggaacagaaactgggtttatgaaaagagattatttgcttattccacgga

SEQ ID NO: 53166 - DNA, 261 bp, Mus musculus
  source 1..261: mol_type = other DNA
catttaataaaatccacatagagttgctgtcagttctagccagttctgtgatggccgggctacacagtctgtgctccctcgcgtccaacagctgcaggcctgatgcaatgaagaacagcaccgtggtgtggtgcatctaagtcttaaggacacaggggaggggaaaaggcgacgcctcctcgtccctgagccccttcgggccccgcccggccccgccctctccccacagctccgggcagacccgcccgagttacaagagcc

SEQ ID NO: 53167 - DNA, 312 bp, Mus musculus
  source 1..312: mol_type = other DNA
gcttggtctgtaaaatgatcagtctccacctagagacctatccagagtcaattttctagtcagaagatgattagtgaccggatattataataaaagattctcccagcatctgtttcaagatttttgagctttatggtatgtagagtcgaaggctgaggcttgaagcttttagtattgaattcttaaacaagttgcttagtgcaaaatgaggaaattcagcactgcatcttgctctagagtattaagactcacatcgatggattgtaccggtccaagggaaccaactcaagtgagcagcagcgtcaaagtttg

SEQ ID NO: 53168 - DNA, 428 bp, Mus musculus
  source 1..428: mol_type = other DNA
gctgaaggacttgcaaaatgaaagtctatctttggaaaataaaatattgcttcagtaaatttaaaattagaaaacaaaactcataattcaagtaaaattgctttacataataaagcagggcattcttcctaggtgtcactgctacagaaacctgtagatgtcactggcatctgtctgggctctcagagtgtctaatgaacagaatctgtcaaattagaggcagaggtatactttattttcttctcttccgaaagattaagatgggttttaatgtagcattctaactagcaagacttaaggcatgctggagtcccggaaggctggtgcgcagcgctagggaccccggggctttacggtaactcagcagcgccccgggcccccaccctcgtgcgcaagcgcggaaccgttgcctgcagagcggttgcagg

SEQ ID NO: 53169 - DNA, 758 bp, Mus musculus
  source 1..758: mol_type = other DNA
gaatttttcttacataatataaagctatattagccataaaaattttccagtgattagcagttcactagaagcaaatgctttacaaaggaaaaacaaacttttaaatctataataactttatatgaagtaggcaagccagattgtaatgtctttataagttctacaacctgattgacattttataaattctgaatttaagcattatttagaacaacatctggatagatctgagtttcaagaacttccttaggcataccgtttgcaaagaaacaagcttcccaaacgtaaacctcctgcaatgaggacagatttctttcttaagatgacttttagttaaaattttctttataactttagtgctgtgaaaaaaattgcttgtactgtagtctcctgccaggcagcaaccatagccaaaatttactgtctgggggtctaatttatgtataaaaacaaacatacctagacaactctgtcttagttttgtatggccggagcactctcataagatgattactcttgtaataatcttaattaacaatgtatgggtgagtagaaaatcttaaatttgcgaacaaactgccagctcagtcagtaaaacactggcaattttaaccataatttttaagtttcttttgcaatgttaggataatatctacaaccttggaaaagcaatttcaaaacaatttatcatctttaaaatcaatattagaaacatcattaccagggggcggagcctccccaccgcgaggggaagggcc

SEQ ID NO: 53170 - DNA, 296 bp, Mus musculus
  source 1..296: mol_type = other DNA
ttctggattttaaaaaaattgagttgggtatgtagccagatccctcaacggtctaagtgagattgaagcatgctaatatccacttatcaatcagtgcataccacatatgccattgcttaaatgaaccacacagttctggctattacaaattaatggtatagctggatcttcagaatgaactatttccaattttctgaggaacctccagattgatgtccagagcctctctagcatgtgctaacatatctggatttcccagaattaattctacattcttttagagtaaatttttatat

SEQ ID NO: 53171 - DNA, 228 bp, Mus musculus
  source 1..228: mol_type = other DNA
tcagatatgataggttttgtattatcttatgttttacatcttagtatgtgagtaaagaaatctattttcaataaaaggaaaaacaatttaaaaataaataaaacccctgtttaatctggtggtgacacaccttcaactcaagacccaagcctgccttcgcagtgcacgcagggacttgtaaggcaaccactttgccgcagcttccggaagttggggcgtgttaaaagc

SEQ ID NO: 53172 - DNA, 315 bp, Mus musculus
  source 1..315: mol_type = other DNA
tgaaacagacacacgtaggtcacttctttacttttctaatccagagacgtctctaaggagaaatgagggtagaccccacagattctgaaggagggaaagccgctctttcccatcggtaccctctgtgcccatctgggacccagatgcctctgccgggccacagaaacagcgcgcttgttgccaggcaccgctcttgctccccgcccgcgccctgcgggtttgggcaacacgcccacaggaagaggcggggcggcgcggcccgctgcgctgattggccagcgctcgcctgacgcaggatcccgctataagtgcggc

SEQ ID NO: 53173 - DNA, 251 bp, Mus musculus
  source 1..251: mol_type = other DNA
gaattcagtcaactgtggctcaccagttaagagcaatggcttgcatatgttatacagaaatacatacatacatacatacatacatacatacatacaaaggtagggtcaggtcctcacctggctggtagctgcagggtggagtccatgaagcacgcccctctgaaaaggtcagaggaggaaagacagaacctggagacagcagccaggtctgccaggcccagcccagggcctactgctggcaaatgttctgg

SEQ ID NO: 53174 - DNA, 313 bp, Mus musculus
  source 1..313: mol_type = other DNA
tcaagatgtctccagagacactgtgaacaataacacaaatgtgtctccagagacaggcctcaggtatacagtaaagcccaagacatacctggggtagaatctgttctaactcctgcctctaagaagagagttgagagactctaaaaaaaatatttcactgaggcattgccgagggactgttgagtgtaaaacactcaggtgacactggctaggacccgggacctaaagtcttctaagtttgggtcctgggccctcagagcccatgctctctagccctctggtaggtgaaggttctggacccagaacatttgcc

SEQ ID NO: 53175 - DNA, 274 bp, Mus musculus
  source 1..274: mol_type = other DNA
cattaggctaagcaggcttcacagcctggagctcagcagagatactgttatccgctggcctggccggcgggctgggagcagggcagacagaccttccgtgaaggttgctgtcttccataagggagaatagttcctatcaaggaggaaatcttttcttttttgaaggcacaaaatccatgactagctactgagtatctgtacaaaagcaaatgactaccagagataggcagtctctcagccctgtctgggaggccccgcccggccgctgtgctcc

SEQ ID NO: 53176 - DNA, 351 bp, Mus musculus
  source 1..351: mol_type = other DNA
cccagggagcactgtagacgctgcctgtgggagctggtctagcagtactcaagctgaacttactaagctttttacaaatctttttttaagtaccattgggccaaggtagcgctctcttagcttaaactgctcaacgaatgataacttggtgtcaatcagggattgatgcccaggctgtttgtccactttgagtgacaatctgatcccgttcactctggcgggtcattgtccccaggcagcaagaggtgggccggcaaaggggcgggaccgggcacgtggcctggggcccgcctctcagacacgtgacccgcccagggcaggggaagggctccggtggggcggagccgcaaa

SEQ ID NO: 53177 - DNA, 575 bp, Mus musculus
  source 1..575: mol_type = other DNA
aaatgtttgcacattggaaaaaatacactttaaggttctgaaaatttctgcctcacctttctgccctgagtcacactagggtggtctgatggaccttcaagtttgccagttgtgaaagcttttaacttttaaggaactgatgtctgtctcaaagaaacatcgtacaattgggaatagttacactctcaagaggatttgaatttaataagtcaaaactgcgtacagccaggaggagaggccatctgctcctgcagattgcttgacagtcagggctcagacttgggctcatttcgggcccctgcgggtgtgcctgggcgcagcggcctgcaggactcccgtgcgcgctgggtccccatcccccgccttctcagttgagccgagagtccgagaaactgggggggggggggcagtgccccgggggcagtgccgggcgtggtggccccaggccctcgagggtggggcaagccccttcgcgacaccgccctccccgggcagccaatagatgtggaggcgccgcgcgcgggactggccagcgcgggggccgggacgagggcgcttcagcgcggttataaggg

SEQ ID NO: 53178 - DNA, 230 bp, Mus musculus
  source 1..230: mol_type = other DNA
caccgttcttttccaagtttttatacaggagacttcccatcggccgagcgcgttggcgctctgaagcgcgctcccgcttccccggctccaggcagcgaagggaggaggaggaggtccgtcgccgaccgcccagcagggcttaactccatgcgggcgggcgcgagggagggggaagccgcggacccgccgctccagcccgctggccttccctgggccaatggcaggcgggg

SEQ ID NO: 53179 - DNA, 472 bp, Mus musculus
  source 1..472: mol_type = other DNA
tatcattagtattgttatcatcatcatcatcaccaccaccatcatcatcatcatcattcttgtaagtcaaaagtgacggccaatcatagcagacaagacttctgttagcgttgggcccaccttgctaggaaggaacgtttgccttagcacaatctgctgtatgaaacagaagagtcagaggttcaaggtcattctcagctacacagtgagtctggggccggcctcaggccccgcgagggggcgcgtctctgccgctggaagtagcctgagtctctccggggagtggtacccgagagaggcggagctcgcgccccacgccactcggctcagccaatgggagctcgcgccgcggggctcggcggtccgcgccaagggtgctgaaaaccctgcgcgcgaacggcggtctccgggcgcgcgctcgaggcagcccgacgctcccctagttcgcgagcctggcgtgcgctgccccgcg

SEQ ID NO: 53180 - DNA, 284 bp, Mus musculus
  source 1..284: mol_type = other DNA
gccatttatggaacctccaaacctatgagagttacaagtgttttaccaggaaatggtatttatacaagggccttgcgggataagtaagatttcagcaagggaatccttttcaaagtgcaccctgtgaccttcagacactgtgatggaaacctcctgaggaatacacggtaaggggccctaactcaaactagagtttcaccgggcactccatactgaggcctccgcggaagggtgaggccctaggtcctggcgtcccatgttctcaggagtatcggacctggtgg

SEQ ID NO: 53181 - DNA, 212 bp, Mus musculus
  source 1..212: mol_type = other DNA
aagggccctaggatgggtgagtcctcactggaaggagggtactaccttcttcctaccggcgaagaatggcccaagcccgggctgcccggtgctgttcccgcggctctgccgctttcagagacgcttccgcgcgagtgcacagcagtggtttggagtccacagcgttctctggacagtccccaccaggtccgatactcctgagaacatgggac

SEQ ID NO: 53182 - DNA, 433 bp, Mus musculus
  source 1..433: mol_type = other DNA
atggcaagacatgcaccgtaggagttcagtctgggcaatctctattgtgtagagaaaaacagagtctttcctatttggacaatgttgaaaagcaagggtgccctgggtcaagaaggttcttgatacttagcagctggccagctctaggagatcagcgagtagccaccgagcggaaaatctggggtggatctccacgcctttcggagcggagtcagagggcacctcggaggaggtggccagctgggcgaccctgtggcgtgagacaccaccgccacccgtggtgcacgggccgaatggatcgcagcggtggagctctgccgtccttccaggcggggcccagtgagcgcctggggtgcgcggggcggcggccgtgccctcggggcggctccgggcggcggcggccagtctagggctgcagtgcagcgcgcggccg

SEQ ID NO: 53183 - DNA, 375 bp, Mus musculus
  source 1..375: mol_type = other DNA
agagtataactcttagtggcagatctctgagtttaaggccagcctggtctacagagtgagttccaggacagccatggctataactaattatgctcaaaataattaaaatagctcagctgccactgtggctaatttccaccattctagaaagttctatgtagaagcacttctctagagggcactctgcaaattgtaatcagaatgcctcagacctacatagaagctatctctgagatctccaccgccgcgtcgagcgccccctgcagacgacgcggcaccctgctacccgaggttgcggctctgggcgtaccgccagagggcgctgagggcggcgggcggggcgcggggcaggcggaggccgggctagggctgcgg

SEQ ID NO: 53184 - DNA, 342 bp, Mus musculus
  source 1..342: mol_type = other DNA
cctgacgtcattctcagaatgacaaaaagcagctttcaggaaggcgattttcttcatttatcagaaaatcaaaattgatcaaacgaggtcgcgggacctgaaggaggggaaagcagctaccgtgcccctgttccgtggaggcctcagccccgcgcccaccgcccccacgcgcggggatccagggctccaccacctcgggcctgcgcgcctctcccctccctggcgctagggggcgctgccgccccacggccgtcgccatggtcaccgctggcggcggagtggggttacgtaaaggacgcagcgtcccccggggggcggaggcggccttcgcgccggcgccgg

SEQ ID NO: 53185 - DNA, 551 bp, Mus musculus
  source 1..551: mol_type = other DNA
cgctctcgagcccgccaagacgcagcatcccggcggccgggagcctggccccacccgctctgccccgcccccagcctcgcgccgcccccagctctcccaggccgctcgggctcgcggagctcgctgcccatcacccgcgggcccgacccgaggtgctccgagtcggcgcccgtagttgcctatggcgccaccgccaagtccgggcctcgactcctgagagggccctcaggccgcgctgtgaaccaccgcggcgaacgccgcaagctcagcccgtcgcacctgctaggcccagggggcgtcccaagccggagcccccgcgggcccggaagctcccgccgcctccacaaacggggccctgtcctcgccctaggctaggcctgcctcagaggcccggcggcgccggcccccgccctccttccggccccgccggccccgggccgcgcgcccccgttaccgggaatatggcggcggccgcggagagtcccgactaggcccgaagcgcgcgaaccgctctccgccccgtgaagtcctcaccgcccggaattcccgga

SEQ ID NO: 53186 - DNA, 345 bp, Mus musculus
  source 1..345: mol_type = other DNA
tatttaaggttcccatttgggacactgaactggctgcttctccagtttacaagactgaaaaccaacttgaggcttgcatgctgttaactgaagtctctgcagagctggccgggtatacttgacttatggttattggccatgtaccaagagccccaagctcatgggggaaccacccaagtggaatcgcaactatttttaaagtatccaccgtgagaagtggatacttgtaaatggaagattccaggattatcttttcttcgtggtcttgtccaggcagcgtgggacaaccatggaggaagggccaaatttgtgctatgcctgacttccctaggtgctggttgctaa

SEQ ID NO: 53187 - DNA, 413 bp, Mus musculus
  source 1..413: mol_type = other DNA
tgtgatataaagaatattacatagtattaaggagttagcagtaaagtataataatcataaatatatgtggatctaatagagcactcaaatatatggagattttaatgccacattttaataaggaatagaatatatagatgtcggaatcaatacaatactaatttaagaatatttaactgagatatatgtacagataaacaagttgtcaaaaaacatgtcttgataagtttaagataaaccataccaaattaaaaccggcttttaaaagctcaggaaagaatggaaaattccctgcatgatcggctccagcctgcgcctcgccttgaggggaaactctccctacagcccgaacccggctctctcgcgccagcgtcgggaccacttccgggaattccgggcggtgaggacttcac

SEQ ID NO: 53188 - DNA, 422 bp, Mus musculus
  source 1..422: mol_type = other DNA
agagcacccgactggaagacagctacagtgtatttacatataataaataaatctttaaaaaaaaagtaatcaacaatgttctactgagaaaactatatccaagttagttacttcattgggtcagatactgaaatcaaacttgctactaggaagtttcatgatataacatagtagctttttgtatgtatccttgacaacaaaattcttactgaaatatttaattcaatattgaatacatattttcaatttaaacttaacaaaaattttagcattgccacctataaaatatgggtgactggcattgaagccatatgccaccatatacagctactgctagcttttttaggttccatggcttgaatagaccattgaaacttggaaaaggtcctatagttgattgcctttaagctaacagtatgaaa

SEQ ID NO: 53189 - DNA, 278 bp, Mus musculus
  source 1..278: mol_type = other DNA
agcctggtacaggcacccagttcctgtgttcagttcctcaggagtgagtgacaaataatattccactcaggagttttactccaggtttagatgagacgccttttgaaaagcgtgaccacccttagccacacagtgggacaccttgggggcaggtctctgggacccgccggtcagcgagagctgccactccctggctagtctgcagagttcctgagcggtccgattcctaggagcgctaattagcaatctacttccggaatttaaagccagcttccgga

SEQ ID NO: 53190 - DNA, 215 bp, Mus musculus
  source 1..215: mol_type = other DNA
gcctgcctagcctacataggagacctgtctctactaggtagggaaatagcactttcattagcaacaacacgctcttgcttcaaattgcggccagcatggggtgtttttaaaaaaaacacatgggcgcagggccgatccactgtaggcaggcagagcggccagaagaccgggcggctcggtgccgcgcttccggcagcgccgcattgctccgggcg

SEQ ID NO: 53191 - DNA, 267 bp, Mus musculus
  source 1..267: mol_type = other DNA
ctagatgagaaaactgaggcgcagagtggtattctaagaggcactatacaaccagcctatttcataatttatagagtgctatctaagtactctcctagaggaactttataaaggttatgaggggtccggaacccgtccaccttccgttgttaaccaagagaatttacttatcccctggctataggcaagtagagtcattcacttggtaaggctctaccaagggcatccttccggaagctggctttaaattccggaagtagattgcta

SEQ ID NO: 53192 - DNA, 184 bp, Mus musculus
  source 1..184: mol_type = other DNA
tgaggggtccggaacccgtccaccttccgttgttaaccaagagaatttacttatcccctggctataggcaagtagagtcattcacttggtaaggctctaccaagggcatccttccggaagctggctttaaattccggaagtagattgctaattagcgctcctaggaatcggaccgctcaggaac

SEQ ID NO: 53193 - DNA, 425 bp, Mus musculus
  source 1..425: mol_type = other DNA
ggtgcagacattgctcaaattcctcaacctcctaattatgaactttcctgaccacatggggcaagggcgcgtggtgggaacagctcctttgagatcgcgagctaagggggacgttccgcgtgctcccgccgcccctggggccgctggcctccctaggcctgggatccctcccttgcccgggtctccggccggggcaatctcaccggtcacacagccgttcactgcagtaggcttctgcgccgttacgacgtagttgtacgcagccaactccgtggctgctgcctccgcccctgagacacgttgcaggccagagaggccaggcgcagaggatcacgggacggcctcacctggcctcttggaggacttacggagcccgaggcggccaaccaagcgaggccccgccccctgaggtcccgcctaccggt

SEQ ID NO: 53194 - DNA, 394 bp, Mus musculus
  source 1..394: mol_type = other DNA
ctggggaggtacaaatcatcttcagttccacctggtttctggagatgcttcaggactaggcttgcctgggacctgcatctgcggggctgatagaatttgtatcgcagtagaggcactaatagtgctatcaagtaatttacacaccccccccttcctgttttaaaagagggaaaaccccgtgggaagccagcaggcggccacttagggcgtagcagggagcctgcctgcgtaccggtaggcgggacctcagggggcggggcctcgcttggttggccgcctcgggctccgtaagtcctccaagaggccaggtgaggccgtcccgtgatcctctgcgcctggcctctctggcctgcaacgtgtctcaggggcggaggcagcagccacggagttggct

SEQ ID NO: 53195 - DNA, 358 bp, Mus musculus
  source 1..358: mol_type = other DNA
taatactcttctccccacaggagtccaagattcttcatgtaaagagcaggaattttacataaatcgccaacttggcttgcttccttccagcctggcactggcaggtcagagctgactcaagactgcccgcctatcttcttttggtttttaaagaaaaataaactttttaaaagtcttccacttatcatggatacattttacatttagcaatgaggagctggtgggatctgaccagcagacaccaagataagagaaaactccctagattctgagaatttttagccctttcctctcctgacgagggtaaagatgttatgccccattagtggccctggtctgattagagtaataagcagtt

SEQ ID NO: 53196 - DNA, 353 bp, Mus musculus
  source 1..353: mol_type = other DNA
cgtttgctcagaaactaaccaggtcatctgtgcacagtttatctgtggtcaccaatgccaatgggaagtacagtttttaaaaactagttcagccaatttactaatccagactgggctttcttacctcccaggtgagctaggaactcccagcaggtagcttgtgggtcctactgagaattcagattggattctatggaaactcaaaaaccttgttcctgaagtttctttccaacttgcgactcccaaacccaggctgggggtgtgggccgagggtgaaaccccgccctcggggtctcccgccccaggctccacgcctcccggagaggcaccggcgggcggcgctccttttgtgt

SEQ ID NO: 53197 - DNA, 359 bp, Mus musculus
  source 1..359: mol_type = other DNA
caaaagcacttttacattggaacatgttatttaaggcaacctgaacctgtgtcccatgtcatggttgaagaggccaatttgtgctggtctctgccactagcaacaagggttttcttaggctggaagctaatctaaccactgcgcgagtgaggatggatcaagtctgacgcttacacactcatcctctcctgaggcccatctggagcctccctttggaagttccacgcttgtctcaagcaaacgaagggacgcctgcaagtctgcgcaggcgtactcgcaatgggcggagtcctacggcgggggcggggctaggggtggtgccttcccccgcgcgggcggggccgagtggccttccgcgg

SEQ ID NO: 53198 - DNA, 390 bp, Mus musculus
  source 1..390: mol_type = other DNA
aatgttgaatgaatgaatgaatgaatgaatgaatgaatgaatgaatgaatgaacgaatcacaccaacagggagatctctctctctctcttctctctctctctctctcacacacacacacacacactcccgcttgtaattctaacatttgtgagactgaagcaggaggattaccacaaactccaggcttacatacctagcaagttagatccccatagggattcaactcagacagaatcctgtagggaaggctcctgtcttcgggtgagctctcctgagagtagaacgacctctctgcccagccatgagaatggccagtgggcactaccgcagttccaggcacctcgtgacagttcaacttcaaacagggttggcagtgacacaggcccaca

SEQ ID NO: 53199 - DNA, 276 bp, Mus musculus
  source 1..276: mol_type = other DNA
tctgtgagtttgaggccagcctggtctacaaagtgagttccaggacagccagtccattgagcccacgccctcgcatatgcatgcatgcacacgcatgtgcacacacgcgcacacacactgtgttccaaccttcatagaagtctgaatgtattacggagggaaccctagtggtggggtccctgcactccaggacctcaggtcctgtgccagctggggaccccagaccccaggcgacagtgtcagcgttccatgccgccgcttagggggaggggggat

SEQ ID NO: 53200 - DNA, 324 bp, Mus musculus
  source 1..324: mol_type = other DNA
tgaggcaacccagtggtaccctacaggtgggaacggctggggattcgcctggtgaacgggagcagtcgctgcagcggatcttgtgtgtgcggcacactggaacaaaggttacctccaccaggagccacttctgggaacacaattggcagttctgcaaggtgcagacaggcggctggtgtgggtcacctgtgcaggtacaaatgcctgcctacatttaaacattgcagccaaaccttggtctccaggcatcaaattatgtcattttcagatgaggctgcctttggctaaggcttggtggccaagaccttcactcaaggccacacc

SEQ ID NO: 53201 - DNA, 230 bp, Mus musculus
  source 1..230: mol_type = other DNA
gtctcctgagatcccaccagcgtaagctggcgagctaaactgtcacacatagatacacacattcatacatgtgcatatacactacgcataccatatgtagcaccagttactagagatgagctgtctctttgtgtccaggaaagaaggcacagcctctttgtctttcttggaagactggtgggcttatggaaggtagcttggctcccccaccccaacagccctgtaacaga

SEQ ID NO: 53202 - DNA, 186 bp, Mus musculus
  source 1..186: mol_type = other DNA
ctgatctttccccagcctggccacactaagtgggtcctgggcctaccaaatgctccatgtggccttcacagatccaatggacctcctccacacggctgggcagaagatgcctcgaaaggaaggctcccttcctggcccccggaaagcctgcagacgggcttgagaagggaccctgtgacccacaga

SEQ ID NO: 53203 - DNA, 429 bp, Mus musculus
  source 1..429: mol_type = other DNA
aagtgcatgctattttattatcttcttctgaataaaatgtatttactcaaaagtctcttcttccttctggacttctagcagaaatctgttaggatgtacctggtacctttccccctagaggctggaaagcttgcagatctggcagctctgttcctgcagggtgctattgctagcttggggaacctggaaactcaggaatttactgaatccctaggtgggagtcaggactccctcagaagggttgaccagcctacaacggatggcctaaggtggttccacgaggaatcccagaacgcaccttgtgcttcctggcagaggacatcaatctgctaggcaccctaggcacggggccacgctctgggttttggatccgcagggcactaggacccggcggggcgaaggggacagcccatgtgcctgcgtccctcc

SEQ ID NO: 53204 - DNA, 151 bp, Mus musculus
  source 1..151: mol_type = other DNA
cctgggcctaccaaatgctccatgtggccttcacagatccaatggacctcctccacacggctgggcagaagatgcctcgaaaggaaggctcccttcctggcccccggaaagcctgcagacgggcttgagaagggaccctgtgacccacaga

SEQ ID NO: 53205 - DNA, 338 bp, Mus musculus
  source 1..338: mol_type = other DNA
aacgcatgcatagaatacataactacacgtaattttaaaatttatgggtcatggtggttcacaaccccctggatgcccggtgtgtctgaagacagctacagtgtattcatataaataaacctttaaacaatttttacatctgttctaaggtttaaaacaaacaaacaaacaaaataaccccagggcacctgggttgctttcctttccctaacaattgtaagcaaagctttggtggtcacccacacattttgggtgaggattaggaactgcacttcccgggaggaaactgccgccggatctgccttggaaatatttggatgcgtccacgatgcctgccg

SEQ ID NO: 53206 - DNA, 242 bp, Mus musculus
  source 1..242: mol_type = other DNA
tacgctgggaactaaattcccttgagtttacaaaacagactatatttaaaacgtagcaggcaacgaagtcattggcttgcccatatttccctacagactctctaaggcagactctaggaatctgcacttttacaagctcctgaaaaatctgtcttgcacacgaccatttcaaagactagtgttcctcaggcctcttggagcgctcgccggaaacagccgagtgtcgggccttttcctgctcg

SEQ ID NO: 53207 - DNA, 360 bp, Mus musculus
  source 1..360: mol_type = other DNA
agacacgtgatgttgatctctggtcgccatacacaaacacatgtgtactacagtgcatgcacgcacacacatattgaggtgtcctctggcctccacatgcatgctcatctgcacctgcatgtctgcacctatgagtgcatacacacatgtatgcacctatgtgtgcatacacactcacacaagtcaagacaataagaaaatgtaaaccttttgttgttgttttttcctgtaacttattttgcagaccaggctggccttgaattcacctgtttcctggtcaccggtgcagcacacaggagaaatgatcctgtcctctgggttccagaggctcctccacgaagaggagcttccaggggcttg

SEQ ID NO: 53208 - DNA, 363 bp, Mus musculus
  source 1..363: mol_type = other DNA
agtcataccttggtaaggactactcagcctctatctaaattttttatctaaatttagaaccctgaggtcaaatttgggtgattcattgaataaattaattattgaggataagtactctgggtttgaacccacaacaagcagtcatttctgcctattgcatacttgggcccactagtagagttcccctttgttacacagcgcaaagctactggcaccagaacaagttagcgcgctgattcgcttctctcaagaaaaaaaaaattatttttatatgtgtgtgtgtgtgtgtgtgtgtgtatgtataatatacccccaccccactgagctcattgcgcttcctgcccggtacggaacatatgaagg

SEQ ID NO: 53209 - DNA, 290 bp, Mus musculus
  source 1..290: mol_type = other DNA
acactttaatatgtatattaaatattaacaattaaatgtgtattctccgtctttaaaaaccagaggaaaaagatagaaattctcttgaagttacacattctcatctcaccatgtccatggtcaagatagatataagggtcaccactattgtggatactttaactttcaaaaaattaaaagattctttgaggggccagaaaggtgtctcagatcagcactgtacaaataaaaatttgagaattttaataatcaactcattcaaatgctaactgtctcagctgttaccagac

SEQ ID NO: 53210 - DNA, 399 bp, Mus musculus
  source 1..399: mol_type = other DNA
aaaggagcactgctaactagtttcctctggtgtgctgggctgtttcttatacagcccaggcccacctgcctaggcactagattttgtgtcctattgacaaaattatatgatcacaggacaacgaggtcattcttgtgaaagcaagcctgtaagaaacatccttccatggcaggggtttggaggtgtaagctgagtaaaccctttcctcccgttgatcactaattgagaagatgcggaggcacttccctgtgtcaagttgacacaaaaaaacagccagtacactctgacattctgcatgttacactttctcagaggcagacttattcaaggtgggagcctgacattatattcattggctctcggtgaaacttcaaggaggactttggagcttgaaagatt

SEQ ID NO: 53211 - DNA, 337 bp, Mus musculus
  source 1..337: mol_type = other DNA
ctaatgagtgtctttcgtatgccaattggaatttttaaaaagtcaatatgtcacatcgagcacccgactgctcttccgaagtgtacttacaataaataaataaataaataaataaatataaataaataaataaatgcagcaaccacatggtggttcacaactgtctgtgagagcagtcactgcacacatacacgttacataaaagtaaatgactttaaacctatggaagagagttgagtgtaaatgattatttcagcacagtacatccagccctgaatgtccaggtcattctttaattggttccataactaaaatgaccagctgctgacccaggcct

SEQ ID NO: 53212 - DNA, 339 bp, Mus musculus
  source 1..339: mol_type = other DNA
tcaaaggaccacaccctatggagagcggggccttctgtctctccagtcagctggctgtgccagcagtgactgcttcccttggaggcaggaagtctgagttcagggtgtcagcaaggctccatccttcaggaggactgggaggagagtctcctccaggcttctcctagtgtacttgtgttactcttaccaaaaaaaaaaaaaaaaaaaaatcagcatttgctttaaatcattgaaatatcatattatgtctgtaagttgtctcaggcaacactgtactgtgttccaagcaaggaatttcccaagtgggaaaaggaaactgacattctcaaactttatata

SEQ ID NO: 53213 - DNA, 271 bp, Mus musculus
  source 1..271: mol_type = other DNA
tatgttctttctcactctcaaaagaaaaaacatgtatttgtaattaatacctatgggaaagggagaatccgttttctccactgtagaaattgggtctcagaccagcgctgggccaccactactcagtagtagaggctacctcttggttgtgaacaattctgagttcgaagccagcctggtctacaaagtgagttccaggatagccagggctatacagagaaaccctgtaagaagaagaagaagttcatgctgtgcatctagcagttttatt

SEQ ID NO: 53214 - DNA, 383 bp, Mus musculus
  source 1..383: mol_type = other DNA
ttatatgttcaataaattacataatacatggaatacctggtactcctttagttagcagctaaccaagtcaccattgcttttgagactcaatgtaatctgagtaagttagaccaaatgaccttctgttaattttcataaatgactctcagcctcatagacatgactgtcaaatttgggttctagttccatgcatttatataatgaattttaattgtgcaatctaatttctgaaaatggaaagtccacactagagtttagaactttgatttttgaggagactcacaatagaaagacttgcttcttctactggaaaatcagccatagctgggctcaaggactgcacactggtcagaaggctggatggaaccttcaagggccagtgg

SEQ ID NO: 53215 - DNA, 512 bp, Mus musculus
  source 1..512: mol_type = other DNA
ggctgtcctggaactcactttgtagaccggctacatataaatatatttaaatatatttatgtatacatatctattttatgtatactatgtaacatataatgaaatataaataatataatactatatgaatatatattataaaaagattatccttcataaaaggattatcatccacgaaatatttgcaatgtaagccagaattttaagtcttccaggaataaatgaaagctcacagcatgctctggttaaaggagcatctactgtccaagggtctttaagccctcaggaagtcttcgcctgtgctccctagagaaaacaggttttccttttcatagctatctatgcataaagcagtcattttaatcatttcctaaagagtctcttcattaatttcttaagaagagtaaactattaactcatttacttgcctttttacatagggaccagggcgtggcccgcaggccccagtgagtctgcgcactgggctgttgcaacccggcggcttgaggagc

SEQ ID NO: 53216 - DNA, 377 bp, Mus musculus
  source 1..377: mol_type = other DNA
cgtatgtatgtatgtatatgactaacaaaacatgtccatatatatatatacacacacacacacacacacacacatatatatatatatgaccaacagagataactacacttaaaaaaaataataaattcttttgctcatttatgtttttgcaggcagccagatccactgatgaagatgcatgactgaggctatctaattctgcacaatccactagtgacaaaacagaattgtagttctttaaagccactctgctttagggtggtatataagaataatatgactgattagttttaattctacacttgaaatggaagatacataaagactactagtaaccaatttatggttctataattctaaatcagagtacaacaatg

SEQ ID NO: 53217 - DNA, 410 bp, Mus musculus
  source 1..410: mol_type = other DNA
ctattttgagacatacttcattttaattaaaaatatttttattgaaaatagaaatttgcttttctacagtatattcctctctttagaaaccaaacaggccagtataaacatctccaaaaatacactccattggaagaaacaagtattaaccttgggagctgctttttaaaagtggtttccaaccagctggaaattatctccatcattaattctgtaagtcagacggtgaattctaatatctctcattcagaaggggacagacttaatgcaatatagaaatcaaggaatcgttcccccaaatttgttattttgtgttatttttccaaacctcaaacttcagaaaggggaagcagagcagctcttcgttttcctacttgtaatcacgagtacttccggggaaagcacacatg

SEQ ID NO: 53218 - DNA, 187 bp, Mus musculus
  source 1..187: mol_type = other DNA
gcctggtctggcctcagtgagagaagactcgtctaaccctcaagagacttgaggccccagtcttgagaaaatctaatatttgcctcttcggttcacagcacccgaaatgggagctgaaattcatttctgctaaatttgacgtgagatttacatctgggtccccagggtaatttttaagaagctgcta

SEQ ID NO: 53219 - DNA, 474 bp, Mus musculus
  source 1..474: mol_type = other DNA
ttggtggatgaatcaagcatcaattacatacatacatacatacatacatacatacattcatatatttgttgggtggaacaaagctccaacaactttatttttatcccagaaaatctttcaagacctacaaaaattacccacattctatttatatttattcattggttcctaattatttctggccttgtagcttttataaattaccaactcctcatagtccttcattttttaaaaatggagccaaggatattccctaggtcaaggtatgtcgtaaggagccagtcattgtacaatggatcatgcctgtgtgtaaagatacagtgagatcatgaagtaatgtactcaatgtacaattggtttgggatgctacactgtaataatataccacaaattgatacttgtctatattctcaataaaagtgttatttgcatttcaaaatattacccatatccatttgtctaaatgacaactgc

SEQ ID NO: 53220 - DNA, 494 bp, Mus musculus
  source 1..494: mol_type = other DNA
tttaagatgtgttgcctagagatgagacaacgtgtctttatcatgcttttgagattctaaagtgaagtgtgtatttttatatataaattatacaacaccagatattactttacagaattggaaaatagactaatgcttacattaatcttaagattattttattttatcaacgaacaatcaatcctatattctggagatgacaagatgaaatgggttatttactttaaaattgcaaagcactatttacttctttgtaaccaataaaagcatgcattgaaagttttctaggaaaagaaatgtatcaagaaaatgtatgaaattgttataaacaggcatttgctagttttgacacaattctcctgcctcagatttcccggcgattgaaggatgctcagtaaagagagattgtgacagccactgtttttctagtggataagggaactagctgtgttttttgagatcctcagcagtaacctttaggatttagaaaacat

SEQ ID NO: 53221 - DNA, 632 bp, Mus musculus
  source 1..632: mol_type = other DNA
gactctgggtccagtgaaactttctggagccagacatacatacatacatacatacatacatacatgcacatatacatttgttggatcgagcaaagctacaacaaatttcacatatacacatatatacatatagacatacatatacacatatacacatttgttgcatgtagcaaagctccaacaagtttatttttttcctacatcttatatagcccagtaaaatctttcaagccctataaaaattacaatatggttacattccttttttcatacagtaaacaattacagtgaatatgtgtagaaaaaaaccattttcctaatactctcactttgaaaaacaaattatgccctagagcccatattcatttgtatttaagtaacttcttatagattaacagagtatacatagacacgataattttcttttcttactagcaggttgcaatgtgcacttaaaggaaagaatcaactattttgttacttatattaaaaagtaatcttatgaaattttttaaaaagaatcagaagtctaaattctatataaaaaaacaaaaatttctaccttgaattttcagagtacacatccacccatatatgatggctgaggcaaaggtttctgcctcttagtcagt

SEQ ID NO: 53222 - DNA, 581 bp, Mus musculus
  source 1..581: mol_type = other DNA
tccctaggttccttctggttgactccaaggaaagaaggaaaattaattatgtcaaagtcagcttctgaaaagccacagggacacatgtcttcatgactgtgtctggagtgcagccagtggtcgaaaaactgtgtacagagtttttttgatttttcagaaattgttgaagaataaaatactgtaaaacattcaattgttacaattgatgatacattactgtgtgttcagtagtgtattacaatataataaagtaatatatcaaaacccaaggtcgtgattactattatcatactttattatacattgagatctgttttattcatcagtattactacaacttgtaatatcattagttatcaagatagtcctttaaattctacttagaagaaacacaggtccttcagaaaactttcttcttgttttcagtttaacgcttaaacaactgaagttcaagaaagtgaacttgggcttaagtggagctggtgcgtgttgggacttactacccccccccccccactctctcttagtgatttttctgaagttactgggactttctgatataggaagtacaggcacagtaa

SEQ ID NO: 53223 - DNA, 385 bp, Mus musculus
  source 1..385: mol_type = other DNA
atctttcctgatatatacttatcagttcctgatagcaacatttcaagagccacttttaattgatcagacatgtctgtctcatcagtatgactgtagctgtttatctacagacatgattacatgtatccatatccttcaaaagagtattgacaaaaacaagattatctgacaaaatgaaaccaaattttgctttgggtattggttgccaaggggattccatgggctttgccacagtagaatcccaggggtctccaaggagagtacatcagtgaagcacttatatgctcttccctggagatttgttaagttgtttaattatttctacatatcagagaaaatgcagtactgtgttcaactatacatttttgtacaaatgagaggattt

SEQ ID NO: 53224 - DNA, 305 bp, Mus musculus
  source 1..305: mol_type = other DNA
tctctagaatgtgccagagacctggaagatgagagactctcattccagagtcaaaacctctgacccagaactgtctctgcaggaacatggcccaatttgggactcatgtgcttacacacaggagccctgttgtggctgcactctgagaggtcttgcctcagtgagagaagactcgtctaaccctcaagagacttgaggccccagggtttgggagtctacacttttatatagaaacagtaatttctactttgactcctcagagtacacatccactcatgtaagcaaatgtttctgcctctaagtca

SEQ ID NO: 53225 - DNA, 510 bp, Mus musculus
  source 1..510: mol_type = other DNA
atgtcaaagtcaaaagccacagggacacatgtcttcatgactgtgtctggagtgcagtagaagtgtaactccctggacacatctcctgttagagaagtccagtggtctagtttttttccccaatactgtaaaatgatcaattgttacaattgattatacattacagtgtgctcagtaatgtattagcctataataaagtaatatatcaaaatccaaggtcatgattactattatcatactttactctgcattgtgaaatgttttattcatcaatactactatgacttgcaatatcattagtaatcaagaaagttcattaaatagtagttagaaggaagacaggtctttaagaaaaactttcatcttttttgctgttctttgtttaactcataaacaactaaagttcaagaaagtgttgcaactcacctggttcaattagtaatttttctgaagttactgggactttctgatataggaagtacaggcacttcctgtgcagtgaacacagaa

SEQ ID NO: 53226 - DNA, 379 bp, Mus musculus
  source 1..379: mol_type = other DNA
tgattcctaagtattcacatttgtcagctataaattttgactcaaacatagaaaattctagtctctgcacaggtactggtggacatatctccactgaacagaacctctctacacatgctctatatcctgactacgaggaggtggcacctcacctctatgtttttttcacaataataaatgcaatgaatttgttggtgtcaactaactcagaaaatgaaatatttaaattatcctaataaaattagctaaagaagatgaaatcaacaagttgttgaacatgttttcttttctatcaaaaatcaagtccccacagatgtgtgaatttatatctgggaccaatacatagctctgtagcctacatgtttaattattggggaag

SEQ ID NO: 53227 - DNA, 426 bp, Mus musculus
  source 1..426: mol_type = other DNA
aaaacagtgcccatgagaccattgggtattcatgaagtgtttcctggtaactgtctaactaccaaagaaaaacttagttgtattctaatagtgatctagatttttgagctttgcagaaatcattaaatattttgttaagttcattgattaaagcctttataaatgtagcatattatttatttacacaactttcatgactcataagtttgggaagatcaggatctgaaggcaatgctatccttcatcagatcagaaattagggtctctgagatgctcagcagggtattctagatctaggataattagagaacacaaaattcaaaccagtgataaaaatgtcagtgctgtcatgatggaactggtccaattagtcattttcctggttactggaataagcgccacttcctgtgcagtgagcacagaaga

SEQ ID NO: 53228 - DNA, 398 bp, Mus musculus
  source 1..398: mol_type = other DNA
tctctgcagtcaggaagcagacagatgagtgctcactcagctcaaaagccatgggattttgaattccatattcaggattcatcttctaagttaaatgcttatggtacagaggtaacctggtgtgtggcacaggacttttagagaaaaataaacatactataaatatgagagaatctgattatctcctctatgtgtgacagttgatgtaaacgcaatatatttaaattaccattgtcttaatttatgacaaatgaactaagattaaacattataatttctataaaaacagttttagcaacatcactgatacgttatgtatcttgctccaataatgtgtgaagcaacatcttagagccagatgctgatggctccatggccattagtgccctcaaatagga

SEQ ID NO: 53229 - DNA, 400 bp, Mus musculus
  source 1..400: mol_type = other DNA
cagtatgtacattagaatcctctattcatatatatatacacacatatatatataccttaatttcttttgagacattttattatatcccaggaaaataactgaggtgatttagtactatggatagtatcttgcagaaggcagacctgttcactaaaagcacatgttcagataaagtatatttcataattcaaatagtatattgaataattccagtggcatggtttacagctaagaactctgatggtgcttttgtcaagatcatctgctgaggatagtaaatactatgcattagggtccataaatcccacatctctggcagaattatgctctaaatgcactacttttcattacagcaagagaaaggagtcactgatatgttccgcatgaagataatcattgg

SEQ ID NO: 53230 - DNA, 349 bp, Mus musculus
  source 1..349: mol_type = other DNA
tgaatttacaaatttccctttctaactcagtgaagaattggaattttgaggatagtcattttgactatattaattctgccaatctatgaacatgggaaatctttccatatttctttcttcagaaacttgaagttctttttttttaaagatttatttattttatgtatatgagtacactgtacacaccagaaaagggcatcagatcccattacaagtggtcgtgagccacttagttagagtcacactaaggtatttgcacttatttgagttaattttatatccagctactgcactgaagcttaaacatctaagtcttaataatactaggagtttgttaagagacactcat

SEQ ID NO: 53231 - DNA, 430 bp, Mus musculus
  source 1..430: mol_type = other DNA
aaatatgggtttaagatgtttttcatagtgagagtttaacttctcattttgaagaagtgttacctttcattggaaagaaaggaattttgattgtaaattatatctcatccccagttctgagttagaacctgctttgtaacaaggtactcaggtgatatgtgtatttttttaaagtttgcaaacaaaacctgctaacatgaaagtattactatcagtgtcttgttcagtcagacaaaaagtgatgtatttaaaagaacactcttcagatgagtctgatgggagttttaagaaagtgtataaaaccactctatacacaataatgcaagtcaggcttttgttcctttgggaagtctcatctctctgcagccagggtcgagacagaggtgctacttagttactacctgcaggtcatctgctccagcacataaga

SEQ ID NO: 53232 - DNA, 620 bp, Mus musculus
  source 1..620: mol_type = other DNA
ttaatcccacactgtgtaggctgaggcagacagatctctgtgagttcgaggccagcctatctacatagtgagttctagaacagccagaactacatagagattttgtctcaaataaataaataaataaataaatagcttaaagctcatatcagggccatgaaaatgatcttgaatggtcattggagtccatcatttattatttcaaatgaagctaccttaaattaatggcttttcgaggttactttcttttaattagcatatggctcagcggttaagagcactgactgctcttccagaggttttgagttcaaatcccagaaaccacatggtagctcacaaccatctgtaatgagatctgatacagctacagtgtacttatatataataaataaataaatcttttttttttttaattataaaagtaaaaggacaggtgacagccggttgggaatgcccaagccagtgcttttaccttgaaaactccagctacagctcttttgatagatttgtcaagactgacaaatcaatagcatctttctatgtccctagagaagagacataaatgtttcaacctgctccagaaccaggtgctggaagtttcctctacttccgtaaaggtg

SEQ ID NO: 53233 - DNA, 295 bp, Mus musculus
  source 1..295: mol_type = other DNA
ctgtaactggagaggttaagccctagctgtagggttacgaccaccagggggcgtggaaactttcgcagtcctcgctgggccagggctctaaccctgccttacttgactacctttatggcagcggttataattagaaagtatctatggcctttaagttcaaagtcgaggatacttctcgaacttgagaccaagtcttcactattgttgaccccccttttctaaaaattcttcaaatcccagggctcttgcttcttttctcgtacaggctaagcagaaaattgctaagcagcctcat

SEQ ID NO: 53234 - DNA, 377 bp, Mus musculus
  source 1..377: mol_type = other DNA
tcgaggatacttctcgaacttgagaccaagtcttcactattgttgaccccccttttctaaaaattcttcaaatcccagggctcttgcttcttttctcgtacaggctaagcagaaaattgctaagcagcctcatgttacgccctacgggaacaagtctctgagcccgtaaggcggaatatctctctcttcaacctgaggagtccatgcttccggcgctggagcgcgctggccctttaagcaggagctcggggagcggcccaggtatggggcgggcccaggggcgggcgagccctgagccggcgcggtctcgtagccggatttggagcgcggcgccggcgggggccggagggggcggcgcggcggacctcggtggcctc

SEQ ID NO: 53235 - DNA, 463 bp, Mus musculus
  source 1..463: mol_type = other DNA
acagtaacgtgttaaggaattaaagttcaccattcattcccaggtgagacaaccgcctgagtgacactcgtgaggcagaggcaggcggatctagcagacttctagaaccagggtgctgaggcggaagctgaacaaactccgctgggcttcatcctcagcggaagctcaccgaccttgctgcggtgaccccagccccaaggctgcgcggcccgttagggctctcccgctttccaacgggaccttagataaaacgctgtcaccaagaataaatccccgatgttctctgctgagacgcttcgggggtcgcacgtgactcaaaagcactgcgcaactgtgcagtggagccgcaagccggggctctctgggtcatccctctccgacggcccgcgcgtgcgcagtgtctctgtccccgcgcagctgccgccgccggggcgcccgcccagcccgaggcgcgcctgcgcac

SEQ ID NO: 53236 - DNA, 353 bp, Mus musculus
  source 1..353: mol_type = other DNA
tgccaatctattctccccgtaaataaggtcggcaaaggaagctctctctgggttcttccggaagctttattaaggccatctgcaagtctcaattgagaagtgcccacttgtgccatttacttcaatgcattcagtaattggtagaaaggtttgagcagctgatatcaagatgcctgattggctttcctgttagccaatcgaaagcaggcacgcgtcgcgccttgagcttctcactgggcggagtagcatgacaggcccgagagaaatgccaatgtccgcggggtcttccgcaagtgacacttggcggcaccaatcgccgccctccttcccggcagtcgagccctccttcccgc

SEQ ID NO: 53237 - DNA, 487 bp, Mus musculus
  source 1..487: mol_type = other DNA
attgagaagagaaaatatcactgtctcactgccacatcatccatattgtagattggagtttaatccacagactgcaggagtccaaatgggatggatgatcctggcccatgtaaccatcctggctggatgatgaaatacatctggtcttgtttcaagcctgtacaggataaacgttacgcgtgaatcagaagcttgtatgtagttaacagatatgcttccggcttgttaaaggaagtgaaagtgccctttaacatcctaactcgatcagcctgaaatgcctgttaaggtcaacttaccatcctggtgcacagtgctcttggtcactatgtttttgataaattaaaattgagataatagagtggcttctgtcttctatttctatctttaaaaaaaaacaacaacaacagaaaacagaattatcttggagacatcataaaatgtgtaagccaatgagaaatctaaggcttgtccataagatagaaatacc

SEQ ID NO: 53238 - DNA, 376 bp, Mus musculus
  source 1..376: mol_type = other DNA
cacggctgaaacatgtttctgcttttaaagtcccctgaaaagagtgctcattatgttttcctgacaatagaagaaatgaattttagtacttttaacccatgtaataaagatttttgctgtctttgctgacaaaaaagtttttggatgaaaaagttaaacggtttaaaaattgcacacatggacagacaaatgtgtggacatgagtaaaccaaactttgcaaatttgtagtgaatatttctctctgaacggagaaaaacaaattcagggtgagggttcagcaaacggaatgctttcctagctatctccaaaataggactgtttgagtttgtaacaatctattcagtgtaccaatgagacatctaagatttgtcctgc

SEQ ID NO: 53239 - DNA, 399 bp, Mus musculus
  source 1..399: mol_type = other DNA
gtaataaagatttttgctgtctttgctgacaaaaaagtttttggatgaaaaagttaaacggtttaaaaattgcacacatggacagacaaatgtgtggacatgagtaaaccaaactttgcaaatttgtagtgaatatttctctctgaacggagaaaaacaaattcagggtgagggttcagcaaacggaatgctttcctagctatctccaaaataggactgtttgagtttgtaacaatctattcagtgtaccaatgagacatctaagatttgtcctgcgtttccagtaaaaaaactaatactgtgatttcaacacttgaataatttttacaaggtactcttctctgttttgcaattggagcagcataaagaggaattaggagaactgtagaattttctgtt

SEQ ID NO: 53240 - DNA, 358 bp, Mus musculus
  source 1..358: mol_type = other DNA
ctgtttgtctcctcaaatataaaaggagcacattccaaaaaagattaacaatctcattaccaatataagattgctcaaacaaagtgtgtgttttctgacaaggttaatacataattctctttaaaatgtctaacttaattcgtttggagatgatcaaaatgagatagacactgcaggatgaattagtctaccttgtgtcttctaacagaaaaattggacagcaagaacttcttttctctctatctggctctcgatggtcacaagtgtgtggccttgtatgtgtgtgtgacagagagagagtgcgtatgcatgcacgagctgcctctgagctcacgccgcggacacggccggtgctaca

SEQ ID NO: 53241 - DNA, 344 bp, Mus musculus
  source 1..344: mol_type = other DNA
accctgccgtgttatcgtggtagatggtcagaaagtaaacgttagttctttctacttcctgtttgtctctgtttgtctcctcaaatataaaaggagcaccattccaaaaaagattaacaatctcattaccaatataagattgctcaaacaaagtgtgtgttttctgacaaggttaatacataattctctttaaaatgtctaacttaattcgtttggagatgatcaaaatgagatagacactgcaggatgaattagtctaccttgtgtcttctaacagaaaaattggacagcaagaacttcttttctctctatctggctctcgatggtcacaagtgtgtggcctt

SEQ ID NO: 53242 - DNA, 435 bp, Mus musculus
  source 1..435: mol_type = other DNA
acactctctttatgagtagaaaatatttactcccaatgatgcacatctggaaaaaaatcaatttattaggtcatcgagatgactcagcatctgctgccaagtctgactgagtttgatccacatattacacacaaataataaatttaatacatttttgaaaaatgagtctttgacaaggattctcttcctgcctgcagccagaaagcatgtcactaacctgctgccctggtctctcttgctatttggaagaaaatccctggacctgaaaccaggagggaacccagatctagttgaggcgggcttccttgactaggcggcccttagagaccagggcggatgcacactgcgcttgctctggtccagtcccgcgctctgaatgcagccaatggactgaagcacagctggttgctgttcagagaaaggacctcaaatgac

SEQ ID NO: 53243 - DNA, 254 bp, Mus musculus
  source 1..254: mol_type = other DNA
tactaatttatagaagtttaattactgcagttctttggcaaagacattctccactctgcaggctgttggagaatgttgcagaatgttcactctgtcctgtcctctgtggacaaaggggatgctccagctctggaatccctgactacggcttcccaaatcttacatccaggagttgtcagcagtatcttgctgaagaccccgcattccagtgcaagacaatttaaactacttgccaggacaaatacttgaacatc

SEQ ID NO: 53244 - DNA, 445 bp, Mus musculus
  source 1..445: mol_type = other DNA
ttctatatgtatacacaacagaattacatttaagtaacaatagaaagtgcatttatatgagtctaactgatagagattcacagacaggaaggaatatatatgttttgttttctgttgacatatatgccaaaatatatgtatatgtgcatacatatacatacattcatatatatccatacagatatgtaaatacattgttgtaaagtctgcataacatcgttttaattaagtgtacaatatagtgtgttaaatatattcacaggattttgcaattatacacattatctatacctcaactatgcttatttcatttaatacaatgtagttaggattcacccatattataccaaatatgaaacttttatgcctttatggttaataataaagctgttctgttttgaaaaattcccgcatagcttggtacacatgctctaagaacttctgc

SEQ ID NO: 53245 - DNA, 460 bp, Mus musculus
  source 1..460: mol_type = other DNA
aaagattggcacatacctgtgtttaccactactattcataatagacaagatagccatcaatagatgaatggatgatgggtgtgtattatatccacttacagcaggacattattaagtgaaaataagaacgtaattactttgcttataagatttctgtcatatctggaagctataataatatagaacatcatttactattgtggaaaaaatcaaaatgtatcttacacaatatgggaatttaatagagcccctttgttgaattttaaaaggaatagacatctgtagactaaatatctttctaacttttcatgtaaaataattagatgcaaatttgccttaaagttaggttaagaacattttaccctgagaaaaggcattcttactgtgttaacactgcagtctggcattgatagaaaaagcaatttaatattcagctctatggaaggaagacggtattgct

SEQ ID NO: 53246 - DNA, 325 bp, Mus musculus
  source 1..325: mol_type = other DNA
tttctgtcatatctggaagctataataatatagaacatcatttactattgtggaaaaaatcaaaatgtatcttacacaatatgggaatttaatagagcccctttgttgaattttaaaaggaatagacatctgtagactaaatatctttctaacttttcatgtaaaataattagatgcaaatttgccttaaagttaggttaagaacattttaccctgagaaaaggcattcttactgtgttaacactgcagtctggcattgatagaaaaagcaatttaatattcagctctatggaaggaagacggtattgctttcagttaatttctg

SEQ ID NO: 53247 - DNA, 539 bp, Mus musculus
  source 1..539: mol_type = other DNA
actcagtgattgacggtcccctgaaatctttattcatacaggggtccccagatagtgggcccccaacagggggatcttcagtctgtctggtactgtctgctcttccagaagacccaaatttgtggcttcctcaggtgccagccccacaaggtgctcatgtgtttttatataacatgcatacacataaaataaaatgtctgtcaaaaatgttatctgactgcttgttcagcatcactatgatctgtatgtgtatagataaggaactctaatttttacagagctaattagtcttccatcttgctagtgcagcaggcagttagagaaaatttatattttgtagacaattacatatcctttctagacatagtctgttgatttcctatgagccgatgagagggcacacacaatctgtgtctcaaatttgcattgtcatttttctgtgaaacacaccagcattctgttttcccattttctaggaaaaaaaaaaaagcaaggtctaaagatttctgtaaaacatttaccaaaatcactacaaatac

SEQ ID NO: 53248 - DNA, 560 bp, Mus musculus
  source 1..560: mol_type = other DNA
tcaatttctaatttagtacttttctacttgtacatatgcatcatggtacgtaatagttccttagatcactaacagattgtgagcttatacttagataatgtcatcatagtttagacacaatcataatgtttccataacaactgttttttagattcactttctggatatattttcaataatgtgaaaactctaaaaaccacaatggactttgtctatgacaatgctaagacttcccaggtatatgattttgtatcaaaatttacttcaagttttgtgacagaatctcaaaaagtgcttctaaagaaaaagtctataggaatataagattcccactattttgatattggcaggcagatttctgagttcgaagccagcctggtctacaaagtgagttccaggacagccagggctataagagaaaccttgaaatatcaggaaacattttgtttctcatactgagagaaaaaaatgttgctattgtcatctattagagacacagaatcttctatatggtcagtggtatgcaagattgactctaaaaaccaaataattgtcttaga

SEQ ID NO: 53249 - DNA, 266 bp, Mus musculus
  source 1..266: mol_type = other DNA
aattctgaatcagatttccaaactttggattttaacttaagacgtttgcatcttcagtgtaaggagtctccttgaaagtcgtttcctggttgcaatgtgtaaaaggcaacaaacgctagtcagagctgctattatgactgtgtttcctgtgccgcagaaacatccacgttttattaaaattaagttgacagaatttctctggaagcgcagagtaaataggactacgtctcccagagtgccctcggcgaagttggccctgcgcgtgc

SEQ ID NO: 53250 - DNA, 437 bp, Mus musculus
  source 1..437: mol_type = other DNA
atttctctggaagcgcagagtaaataggactacgtctcccagagtgccctcggcgaagttggccctgcgcgtgcttttttttcttaaaggagaagctgcaactcaaataaccctcgagagctggcggcgctggggacccttgaggggacagcggcgcctccgggaggcaggtgcgcgcgcagccggcaggggggtgcgcgcgcggctgagaacggtgcccgcccctagcttgagccgaactccaaagtggggggggagaacgggcgcgcgggcaaggaaacctcgcgctctccctcggagccccgcgaggggccgggccaggggggccgatcctcccctccgattggcccgctgcgtgtccgtccgggtgcgcgcgtgcgcgccgccggcggtcgctggcttgagtggcagggggcgggtgggggggggcgccctcg

SEQ ID NO: 53251 - DNA, 608 bp, Mus musculus
  source 1..608: mol_type = other DNA
gggctcctggagagcgccgcggagagcgcgcggggctagccggcatccttggccacagtagccgcgcgaggactacatctcccgggatgctccttgggccctccgcggatggtcgtatgtatcagaatgttaatgattagctgctgctaaatttaagagaattttaaaaagccgcaagcgtttcgctcttttatttttataatccccttcaatttggggctaaaaaaacaggtaaaaggtgccttttaaaagaaggagtttgcgctcgctctcagggaagaagcgaccattcattccgaggggggcgcgagcaggcgggcggcgctcggcgggcgcggggctcggcgggcgcaggacggacggtgcccgccgccctcagtgacgcccgcggggaatgcggagccggccgcccgcgcccagccgccgcgcctgcctgccgcccgcgtcacgcgagacccgcaggcccgggacgccgccgcggggccctcgaagcggatgagccgcgcgcctctgcctggcgcagccaacccgcagacgcgccacccggtgagtggcgccgcgcccgcagccctgtccgcggccggccgctccgagggtgcgggaggcga

SEQ ID NO: 53252 - DNA, 584 bp, Mus musculus
  source 1..584: mol_type = other DNA
gtttgtttgtttccttttgagatgaacaaaggcacaataagataaaaatctacctctctcaccttttaggaattgtaattcagattctggaagcttagtacccagtatcttattctgtagacgtttgaatgttgaataactcagagaattcaaaagtgaacccacttctcttcaactttaaagaaagcagataaaggcactttgctgaaaagtctgatgaatttcatcggtggagcgctttcttactcttacaacttatgaatgcctacatgagcacacacacacacacaattattaaaacgtctgttttaaaaaatcacagtttgtattactaagtaagtacaaaaagttgatgctatttaatcagaaattttaagaaaggacctgtacttccatggtcttctagttttataggaaaaggagaaaactctttaagtataagcctaaaatttctatgtgtgttcaagataacttgaatacagtaggtgtttaaattaaaaaaagaattaactttcaatttttatagccaccttggccaatgtagcatcaaaactttttctgttagcacaattaaaacaacaaac

SEQ ID NO: 53253 - DNA, 614 bp, Mus musculus
  source 1..614: mol_type = other DNA
agtctgccggccgggaagctctgggaccggcccagtgcacgcctcccggctgcggctctaaaccgggccgacggcgtccgcgccggagtgggatcagcgcgatcctccctctcttgtctcgggccctaattagtgcgcacccccgcgcggtcgccaggcctgggctccgcgtcgaacgggagatgagcctcggagggcgtcttcggaccggcctgcagtctccctgcttctaaagatgcagccagtgcagcagcgacagcagccgccgcggctcgccaccccacatgtttccgcggttcgaacgctcgcactagggaacagcggccagggcgaggctccgccccgggcgggccgctgcgccccgcctccgccagcacgccctgtccccacgtgggcctagcctgcccggccccgccctcctggcttgccagatgcggcgccctcgcgccgcgggagggcggggctcctggagagcgccgcggagagcgcgcggggctagccggcatccttggccacagtagccgcgcgaggactacatctcccgggatgctccttgggccctccgcggatggtcgtatgtatcagaatgttaatgattagctgctgctaaattt

SEQ ID NO: 53254 - DNA, 404 bp, Mus musculus
  source 1..404: mol_type = other DNA
ggattatcaggtgcaccaggatgcagcatagcccagctcagctggaggtgggccaggagcaatgggtttgcgggactctgcgcccagaggtgcgcgaaggcagaaggcacctcgccacgcgggtggctggtgcaatcgttgaccgctaaagccgattgaaattctaaactccaggaggagttggaccaatggagcgccgactcagcaggctgaagcccgctctgcctttgcatccggagacgcgggctggcccgggcctgccaagctgccacactcgcgctcctgtgcacagacgcgggcgttcacttccagccggcctcctggtggcgtggcctctgcggctcccgcgtgcacaggcgagcgtaggagtcgtttccttccggggagcgcaggctaagctccgg

SEQ ID NO: 53255 - DNA, 396 bp, Mus musculus
  source 1..396: mol_type = other DNA
cctccagcacaactcctttgaaaagggaacttgtgtgggtggcactgtgcccagctcggctcagggccacattgctgctcctcagttcatggggctgcccccaaagttcgtagccacccgtggggaggcttcggaccctccattgtggggattatcaggtgcaccaggatgcagcatagcccagctcagctggaggtgggccaggagcaatgggtttgcgggactctgcgcccagaggtgcgcgaaggcagaaggcacctcgccacgcgggtggctggtgcaatcgttgaccgctaaagccgattgaaattctaaactccaggaggagttggaccaatggagcgccgactcagcaggctgaagcccgctctgcctttgcatccggagacgcgggct

SEQ ID NO: 53256 - DNA, 313 bp, Mus musculus
  source 1..313: mol_type = other DNA
cagaataaatgcttcataaaagatgtttctcttcttttgccacaaaacactatgaccaaatagtaagttgggaggaaaggtaagccatggggactaccagcccagggatgctcccacattgatcattaattgatctcctcaacagcttgtgtcaagttgacataaaaccatggtttgttactggatagacatgtgtcagcatacctctactgagctacatagtaggcccctatgaaaaaaatctgacattgtctgactccctccactagggcagcgatgacattcagcccctcatttgtgccatataagtgag

SEQ ID NO: 53257 - DNA, 423 bp, Mus musculus
  source 1..423: mol_type = other DNA
gaagggttccggtaggtaccaagggttccggtaggtaccgccaagttcgcctattccagttaacttggaattcagatttgctctgggtggtgttctcaacacctgtaatgcttggaaggatactaaaatacagggcattttaaagccttaaactgtaaagtaaataagacttagcagccagataacattagctgccaagttcttatatcacggaggaagaattagcgttccgtaaccgtgcacatgtcatatgccaacttgaaatctgcacagacaaaatcagagtagtttgctttgtgcaaaccaggagctgtcccgaggcggcagtctggctgcagggctgggcagggaactggccaggtgtgggaaggtgccaaagtccctggccccctcatccggtgccaggaggtaggaccggctggg

SEQ ID NO: 53258 - DNA, 590 bp, Mus musculus
  source 1..590: mol_type = other DNA
agcatccatatggtggttcacatatggacaatatttttctaaaaatcaaaaaagacgtccctgattatttttttgttatactttgctaaattatcacgcatattcccctcggggtggtggaggccgcttcgcaggctgatcctgcaccgggcttccggaccgcagaactgtttccccgagccacggctggaaggagctcttgatggccaccagcggcaggtcgcggttcaccctgagcgtgctgagcagcggtgcccagtccaccgcgcgcagccggtcggcattgaagtccagcacgccgtcccgcaggcaggcgcgcacggcgggcagcggcacggagtcctgcagcgcgcacaggtactcgtagtgcgagaagaagtcggccgcgcagtcgcgccggagcttcaccgagtcgatcatgaccggcaaccccggggccaccagccgccccgcgccgcctcccgccacgcctcgggcggttagcgcccgctctgggagccgccgccgccgttctagtcaccggcgagctcccgcgggcgacgtgcgcatgcgtcggcgcgctcgctgtgcgtcagagcgcgggccacgcc

SEQ ID NO: 53259 - DNA, 471 bp, Mus musculus
  source 1..471: mol_type = other DNA
tataagcaaatcttttacaaatgtaactgaaatggtggctagagacagctcttctttcagaggctctgagtctggttcccaccagttccagaggatctgatgttaaaaagaataaaacagactgatgtatttattacccagagttcactttgtttctgctcaaagtaattcattttaatgcataactaaataacatgacataggattatgctcaatgttactaactctgttaaaatcattaataataaaaccgtaatgaaattatggtctcttcgagtttatttagagtactaacattgaaaactagtaagagttcgaactaagctaaactctagctttgcctaacccaagccacctggtttgcatagaacaacccagagcctccagctgatggcgcgcgtagcgagcccgggtgggcgtggcccgcgctctgacgcacagcgagcgcgccgacgcatgcgcacgtcgccc

SEQ ID NO: 53260 - DNA, 601 bp, Mus musculus
  source 1..601: mol_type = other DNA
ttctcctgcctcagcctgtcacggtgtagaagggtcaatcctacattaccagactgtattcagattcctatctggagataaggaggacagttccgtccactagtaaagagcatcccatcttctaagatggatcttgggtcagaggccactcgaggcagcttcttcccaatggcgtagggcagcccggctgcagagaggcccggagcgcagcgcgtgggctcccggcagggctcccgcagcgccagcggccagagggcaggccgaggccgccatattctcgccgaccacgccccggcagcccagcggcagccgaaggtcggtgtccgcctgccggacccgctccaacggccgtgaccgccgcgccggagctcgcacagagggaggcggccggcgagcggggcggggggcgaggagagcgcgagctgtccaggaggggccgcggtcccgccccttgcgctgtgcccgccccctgcgccggatctgtgctccagttcagagactgagcagccgcggcgcgcctggcaatcgggccgggtgggcgtccggcggaggcgggggcggaggcggggagcgcgcggcggccggctgcccggtttgcgag

SEQ ID NO: 53261 - DNA, 401 bp, Mus musculus
  source 1..401: mol_type = other DNA
tttaaaagcttaaaaaagtttacactatttttgctcttttttttttctgaaataaatttgagatacttgatgactatgcacaaaatactgaaatcctcagaggattaattgacctcaggactttgggaccaattttctctaagtccactggcggctttcacataaatgattaacttggaatttatccctcctcagcacagattagtagctgaggaagtaagggaagtccatccttcctgggaaactgcctcaggaaacttcccgcaggcgcggccggcgggagaggcccggcggtccgctcgcgggcaagggcgggcccgcggctgcgcagccgccgtccttcactctcgctcccggccgcgcctccccgcgtcggtcacgcccccacgcgcagcccgagc

SEQ ID NO: 53262 - DNA, 483 bp, Mus musculus
  source 1..483: mol_type = other DNA
cccttctcagtggtcagacggctgaagcctggagacgagaaattgtgccttcttgccccttcttcagcaaaagaagaggtggaggcggcggcggcggagtccctcagcctcggagctgcaggggtctcgagagcgcgtcgctgccacagcagcgcgtcttctcaaaacccgcggggcagagcggctgcagctgcagctcagacggctgttcggaccgggcgagccgggtcctagcctgtctacgcagacgccccctgcagcctgcggctagctccgtagagcctgacggtgggcgccgctgctgtgagggtacgtacgtacagtagcggataggaaagtgcgcgctccctctctctcttcatcggtcaccagtggcctcgggacagctagtgtggactcgagcttaaaaagccagtcttcattatccgcctttgtaccgataaaggcgagtctctctggctactgtgagggcctgcccacgat

SEQ ID NO: 53263 - DNA, 290 bp, Mus musculus
  source 1..290: mol_type = other DNA
ggtttctctgttgtgacaagtcctacttgcaaaaaaaaactagagccctccagagtaacagctcttctttggaaggagattcccaaagtttcttgattgaaatgacaactcatttggaaaacattgtgttgaagtttgttgaaaaaatgtttcctgcagaaatgtagaagtgtgcattgcctatagaaactgatttgttcttgctcctcccagctaggcccagcaagatagctgtctggactccacagtgcagcttacaggccttcctttccttgagagggaaagtagtc

SEQ ID NO: 53264 - DNA, 475 bp, Mus musculus
  source 1..475: mol_type = other DNA
gtgagtgtacatagacatatctgagaatggtgtctaatcagctcagcgatgctcacgatgctggtcttccagagtatacagaggctgcctgagtgctatccattagccgcagggccgacgcaaaggcatttgcagcctacactcagtacagtgccagccagccagagaggcgctggccgaggacaaggcctcctcctggggccagtgctggctgctggctgccttgaggcctgcagcagtgtcactgcagcagaccctgcctggcacatgcacggttgcagcatctttcagcgcaccgcgtcaggaggccaccgcggggctctgcgattggccaaggagcccctcgccacccccaccagctgccccgcgtcagggcccccgaggcgcgcgcgtgccagcaggctggtggcggtccctgggctcccgggcggcacacccacttgctgccgcggggcgtgggctgggcaagccgccc

SEQ ID NO: 53265 - DNA, 331 bp, Mus musculus
  source 1..331: mol_type = other DNA
tcagtagacaccacttcagatctacagcccaagagggtgaataagcatgctcacatgcttgcaaactttactatgtaaatagtactacaccagctttcaagtaaaatcaggattacttgtgaatatattggttattcaataaattctgacattctggtaacacaaaatgagatacaaggttcttatttttaagatcagacaggacaacagttggcacatttcctgcttcagaggaagaagacagagaaccaagaattcttaggaagcaagaggaagtttggattcctcccagagggcgccctcacctcgagcggtggccgcaggtgggcag

SEQ ID NO: 53266 - DNA, 505 bp, Mus musculus
  source 1..505: mol_type = other DNA
agcaggtaagtgattacattcttagttactggctcacacttttaatattgccaggcaacctgttaagtagttttctttttctgtttaaaaaaaagtatttattcacctgcattcaaattctagtttatctagggtttaaacttttctaaagacttctgtgtgagttctctcaactgattgttcacagtcagttacaaatacctgttttgtgttagtatactagagtcaaggaaatgaaacgttatcaagaatgttcccaacatagagaaaacattttttaagatcagctgaacgcaaagattgggcagaattttattcaaaattgtggaggaaaagaacaacttaagttatcttgtgagcaggccacagaggcgagggcggggcctcagccgcaggaggtgaggacggtccgcactacgagcggggcgcggcgcgggtccgcaacggcgggggcggggctacggccggaagccgagcaggccggtcgcctgggccgcagacctgt

SEQ ID NO: 53267 - DNA, 340 bp, Mus musculus
  source 1..340: mol_type = other DNA
ttcataaagaccaatttttctttttacaagaaactactctttgactgtagatattcatagaaatatctttccatgctctaagcagggatttcacctcctgtgatgttgctgctgagtatcagcccaagtcaacaggcgacagacttttggctttggcttttgtagtgaagtgaaaatctcgatatttgttttgaaaatgctcagtcctgggcgtttagcgccgggatgaatcctgtaaatcttagactttccagagtaacgatcagccctttggggagaggactggcgctaggacctgggtggctcctggctgaggccccgctcgtgagggtatgcggag

SEQ ID NO: 53268 - DNA, 637 bp, Mus musculus
  source 1..637: mol_type = other DNA
gggcagctgatttttattacccctaatatacaataggcatataatattgactgtgacattgtgagtttacttatgtgtgaacataaacgccagtagtatagttttgacttcgcgggtaactattcaactctgaaattatgctgtgttctaataaaattttatggtcacggaaatctaagtttcccctaactttcgtgtgccacaaaatactatgcttttgtctcagctatttaaaaaacgccaaaagcactgttagaagtctttataaaagggagtttgttaaccagggatcaagacccgattctccagctagcactagcagagttgctttttaggagcgagactcttgaagattcccaggcctcgccgtgtgtacgcagcaggcagtgggtactcaccgaagcgggttcgaatccttcccagcagggtcgcagagcaagcggtgctcacctaggcagcgaagtccactgcgctttcatagcctcccctacgcagggcctgagggcgtggctagaaaggcggggctccggcgtgccggagcaggctggacctctgaggttcggccgggctccccgccgcagccaatcagcagccggcgaggcgcggccacttcctggtgggaaggccgggctgtctg

SEQ ID NO: 53269 - DNA, 585 bp, Mus musculus
  source 1..585: mol_type = other DNA
tggctttcagcctttgtaataccaatttatttagactctaagaacgtttttaactgctttgaggaacttcgtctctccagtttagttcgcgagaggccgagagggttgcagcccggctgtcccgctggcagcgcccgagcagctctccaaagctcccgggagacctcgggtccctggcccgctccagcccgggcgcgcctgccggtcaagaactccgcgaccgaggtgctgccaccacaccgctagaacgtcctggcgagccgtgtggacagagtccgaggacgctcctcgggaactcgagcaccgggtcccgcagcctggagacccgcacgcgcagcgcacaccactcttacctgaccggttggcgctacacggagcggcggcgccaagcctgcgctggccgcggccgctccggatccgcgcgcaacccgatgcgggacactcggaccagcgagctccgcagacagcccggccttcccaccaggaagtggccgcgcctcgccggctgctgattggctgcggcggggagcccggccgaacctcagaggtccagcctgctccggcacgccggagccccgcctttct

SEQ ID NO: 53270 - DNA, 392 bp, Mus musculus
  source 1..392: mol_type = other DNA
caggatgacctttatacacaaaaattatgttttgggttgacacccatcatagattcaggtgagctaaggtctcagggccttctaagatctgggatgctagccatgacatcctgagcaaggaggtcactgatgtcattgcacaaaccttcagggcttgcttctcagtttgaagcactcttaattgtgccttcatgggtgcttaaagggaatccacttagaaaacgagtttcaagggctaacttaagaccttgcctttttgagtttctaaagttaaaacattcaaaatcaatcactccagcgggccagattcgtggccccgcccactggcctgctgctctagcaccgcccccagcaaaggagctcctcctccagctgagcccggcagcgaatga

SEQ ID NO: 53271 - DNA, 552 bp, Mus musculus
  source 1..552: mol_type = other DNA
caaacagaactttctgtacactaccgacaatgcaaaccgtgatgggtttgtttgagccagtattttagtctttcggtaaaagcaaaaagtaacttctctgtgtagatggcttacaactacatctagagatatttaagcatgcacatggcgcatattcataaagccctagaaagaatgtttctccggctttagttactttttgctttttaccaaaaaaaaaaaaaaaaaaaaaagtacggacttatttctgccctggaacctgcaggccgctgcgggctaaggacacttccgccgcccgaggaaagggccccagcgcacttgccgctgggacctctgaggccgcggagtctttcggccgctcctgcccgagtcctcgcttggggaccgagagggccgccagggggtagcggcctccttccacccgccccctcagagggcgcacttccggccgcaagggcgctcgggaacgcgaccgcgagcctccaccaaccagcggctgtgctggatgggcgcaggtgcgcgcgcatcacggcgcaggttcgaaactccggc

SEQ ID NO: 53272 - DNA, 397 bp, Mus musculus
  source 1..397: mol_type = other DNA
cctctgtcttcttgctgcagaaagtagacttccctcatctccgagaaggtgagtctcagtttaagagggcatctgacagacacttggctatgctagataagcacttgcctcctaagcagtcaaggagattttaaatctttaatgaaaaaaaaaatacagaaaaagttctatattttgctcaggctatccttgtttggcttctgaggtcaaacatcttcaactccctaaaattagtgcagtttttaaggacagtaaggcacttactaactagatccttagtctatcagcaaaaggagcccttaggtgtgggaaagcctcagaggcagcttgctggctgccacttaggtttagcaagcacctagctgggctcgactacccgccctggtgctgggggtgg

SEQ ID NO: 53273 - DNA, 269 bp, Mus musculus
  source 1..269: mol_type = other DNA
gccaagttgtagacatggcacccatgaccccacagcagccatggttgcctaggcaaggggcaaagaaaggaaactttctgggtattttcatcgctctcgtagaggtaagatatactcattaactataaagtgtctctgtgtcccattaattatccctcagacagttataatcgctagactgtcagggtttaaactgctattttacaatttagcaaatgtactcgagtaaatatcaaaaagaagaaaggaattttttcttctgtgccttc

SEQ ID NO: 53274 - DNA, 495 bp, Mus musculus
  source 1..495: mol_type = other DNA
aatacaggtaaattgtcaatagatgacaaatttcttgtaaagaatgcagtctggggagctactagccaagagtcttggccttctagtctaggctctctgccaagtgtcccgtcactaaagtgacaccttaagtcctgcaaccagggtcaaagggtttccaaatgctaaagaaacccttgtccttggcaaaggaacctggctcagcattcagtctttaaaagaagctgcacatggttttgtagtctaccgctacagcagaagcgtctgacatgtacaaaactcttttgggcagcccagcggttcgcctagactctactggagtcagaagtgaacgtcactctgcgcgctaagcttggcccagatcagacctcagataggaccttctctaattcccagtctgggtccgcacatcctgggacgccagagtcccgactctccacgcgctgcgggacgcaggaggcggggccaggaagtccggccaaacccgccctcgcg

SEQ ID NO: 53275 - DNA, 380 bp, Mus musculus
  source 1..380: mol_type = other DNA
atgtggtttgagtctattcaaaaatttaaaaaataggctcttcttcaatactagtgtttttattaaatgtcattataattccatctttaacatcgattattgaaaatgctgaggtaattaggaaggcaagagcattgctggtgaatcacaagaaaagcactcattagagaatcattttttaaaaacctccaaataagttctatttcaattgtctacaatgacatagtaataagtgctagggctgaaatcaagtttaattttaaaggagtcccagtaagttctccaatgattcctgttggttttgaccagggctgagccaaacaaaagacagccagttactaacttctggttgctaggtagttcatatcctataaaatcag

SEQ ID NO: 53276 - DNA, 357 bp, Mus musculus
  source 1..357: mol_type = other DNA
gggtttataatacaaagaaatatcttaattaacacagctacttagaaggttgatgtgggataataaatagaagaatgcttagtaaatatacaatgaatgaatacatgtctctatcagacaggtttatctggtttacccttcattaatgggaatctgatatttcctgaaaggaaatctttcatgactgctgggctgacactgagcagtcccaatcagatatgaaaacactgttagtgatctgatgacaaagatgaaggttgactttctagttaataacctgctgtagacatgttatttaaacaactctgtataattgtttgaaatcccatgattctgaaactcatggaaagctacatg

SEQ ID NO: 53277 - DNA, 360 bp, Mus musculus
  source 1..360: mol_type = other DNA
actacaaagaagttatcactaattcttataaccagagcatcctaagaatgttagaagcattgtattcaaaatgaaaatgctacagttcaaatttgtcctttccaagttcccagatgaaaacattcagaatttaaactcttaggaggtgatatttacattctttagtaatgatttttcacagataacttcggtgtaatactctatgagggtctaagagtgacaaggaactctgaaaagtctgatataacagagaacagaggtctctttagactaattcatctgtaagttccttaaggatttacatgtaaaggcaaaggctttcagccctaaatgacccttagtgcatgcagataaaaagga

SEQ ID NO: 53278 - DNA, 455 bp, Mus musculus
  source 1..455: mol_type = other DNA
aattcaacactagggagtgctatttaccatcttatttttgtacactgcctagattctaggtccctccaaccataaaattatttcattgttgcatcataactgtaatgttgctacagttataaatcataatgtaattatctgatgtcggataggcaacccctaagggggtcgtgacccaactgacattactttcactttaaaacaatttttacaaatgacagaataatcttctgtgagtaacagtgaactctgactgaaaagtcatgtacagttttctgtcaatttgagcattcaatttgacactaagcctgcttagctagacaggaaatagaactgattggctgtatttttaaaggtggccaaaaacatttcctgtttcctagtctattttagagaagggaaagttatgaagtactataaaatgtcttaaaaagtccagaaaattataactggct

SEQ ID NO: 53279 - DNA, 202 bp, Mus musculus
  source 1..202: mol_type = other DNA
caacagaccttcgttgatggaaccccatgcttaagttcccaatggctttgtgagcatcgtgaatgataccatcaatatggacttttaaaaaaatttcaagcacaagatggtcttttcattatcctagaattggacatggtcaagtccttctgtggaagatgcacagtaaacaaatgtctgttatttgcatccaaacgattct

SEQ ID NO: 53280 - DNA, 308 bp, Mus musculus
  source 1..308: mol_type = other DNA
tactgcatggagttacaacttaagtcctgcctgcaggacctaactcgaggagctggaaggttcggaagacctcagactgttctcctcttttacaactgaataaataaaattagtttcctcagacacaagacaaatgaacacatagtatgcatccttcacaaggtgtacagctcaaagtgacctttcacctgtcaccattcagaattctggtaagtcagagtggcttgatttcgataactcaaggagttaacacacatccaggaggcagggagccagcccctgggcgcggcctgcagggggcaggcgat

SEQ ID NO: 53281 - DNA, 615 bp, Mus musculus
  source 1..615: mol_type = other DNA
ccaaccctagggtaccttagagataggcctagggtttttaaatacccgaaatgaaggaccctaagtgcataaatgccgttaaggtagcccttcaaggcctacggttcttaaatacccgaagtgaaggaccctaagtgcatatttgtagctaaggtgagaccagcagaaagcttcttctgttcgtgctctgggcaggtacccagcaccttgcccttgttcagaacggcggcgcggggctggggctggtgggcggtcctagctcagagctggcagcgcaccgcgaccttgggcggtggcaggcggagctgcggcgacacccggaaccctgccagcctcctccgggccgtgccttcccgtcccgcggggaggggaccccggcggagctggggacggcgctgcctccgtggacccgccgcagcagctccacccagggccccgcgggccggagggtgactgggcgacggtgaccgcagcctccggactcgccccgcccccaagtgcggccccgcccccggctagtgcctgcaggtcaggggcggggcctcgtcccgcgacgtcatcgcgccgcgggcgtgccgaccgggttttcgctgacgcacagccctcagatcccga

SEQ ID NO: 53282 - DNA, 794 bp, Mus musculus
  source 1..794: mol_type = other DNA
agggaggggagcggcggcccgaccccatcttgcggtcctccctgcgggcgaggaggcccgggacgcacggctctccgctcggtagctccgctccgaagccacccggcctggtccccagctcagacagcccagccccacgcacctgcagctgggcggccgcggccgccaacgcgctgtcctccgcggggcgccgcccgccgactctgcgcccgcggcccggcccggcgaggacgcgaaagagagctgcggtgcccgggcgcgcttcgtggggcccctccacgcgcgttcgcgtactaacggctccgccgcgaggggcggccgccgccggggctctccggcccgaggtcccgcgcggccgtggtcgccgtccgcagcgcagggccggtgctgccttctccgcagcccgccttccttggcacctccgaaggccgccaggcggcggagcgcgcggccgcggcgggcgggagctgggagggcggcggggggcgggggggcgagcggcccggttcgagctgctcagtgactggaggagggcgccgaagctgacccgggctccgggctgcaggcgatcagggcaccggcctcgactgcgcagcggagtcgctacgctacggagccgggactccgtccctccgccgtgatggacagccgcgttcccaatgggggagttctagattcgaagaaagccggacttgcaccttgggtccgaggaaggctttccgtgaagccggtagtcgaggatgtgcggcaaggcagagccgcgtgacctccgagtagaagaacttcttccgggt

SEQ ID NO: 53283 - DNA, 498 bp, Mus musculus
  source 1..498: mol_type = other DNA
cgattgcactgcagccaagactaactgggctgcagacaggcaagggcctacctttaagacccggaagaagttcttctactcggaggtcacgcggctctgccttgccgcacatcctcgactaccggcttcacggaaagccttcctcggacccaaggtgcaagtccggctttcttcgaatctagaactcccccattgggaacgcggctgtccatcacggcggagggacggagtcccggctccgtagcgtagcgactccgctgcgcagtcgaggccggtgccctgatcgcctgcagcccggagcccgggtcagcttcggcgccctcctccagtcactgagcagctcgaaccgggccgctcgcccccccgccccccgccgccctcccagctcccgcccgccgcggccgcgcgctccgccgcctggcggccttcggaggtgccaaggaaggcgggctgcggagaaggcagcaccggccctgcgctgcggacggcgaccacggc

SEQ ID NO: 53284 - DNA, 227 bp, Mus musculus
  source 1..227: mol_type = other DNA
ctcatgccacccggccagtactctagagtagcgtggccagaaggcgtgaccaggcctaggtaggaccccagcctggctagacccgagaaggtcaaggagccgctgggaaaccctggccgccgacggtgttggcgggcgtccttcctgctgaaggcagctggaggcgctgagccttcgtctgcagcttgtggtgggcggagcctccgcaggtctcgtccctctcgggg

SEQ ID NO: 53285 - DNA, 417 bp, Mus musculus
  source 1..417: mol_type = other DNA
gagtcaatcaactgggggattctcttttattccttctttctaggaagctggggatttgcatataccagaaagtgttctatcatattgagttacgccccaatttaacatgctacagtttataacacgtgcacacgtgtgtgtgtgtgtgtgtgtgggaaggcagataaagtttcaggcttactctctttgtctggagtctccacccactcaccagtgggtgacccaggcttctgctcccaggtccccagggcctgaagactggggcagtggctccacaaccccaggcgtgggccgtgaaccccctgcctccccctcccgcgccttgaaggcggtggctgccggcgggctggagcgcaggtggcgctcgcagccccagcccctgttgaggagcgccgcagcctgctggcagctttacgg

SEQ ID NO: 53286 - DNA, 380 bp, Mus musculus
  source 1..380: mol_type = other DNA
agttttttcatccgtgagataaggtttaaaatgcttgatgaagagtcaactacgtttccttttatactgtagtttgaaacaagctgtaactagatataaattatagcttagtcaagcccttgtcctggtacagggcatcactcaagatggccttgtctgagattctctctcaatgagtctccatttgtagagaggtataattttcaaatgagactgttccctctcctaacagcagctgttgtggggtcataaggtcaggtgatgttttataaatctctgttgatgggaatctagactcagctatttaaagctataaagctaaacgtggacactgaccctgaggggctcactaattaggtaaggccatgtagtaaattaat

SEQ ID NO: 53287 - DNA, 353 bp, Mus musculus
  source 1..353: mol_type = other DNA
gctttaagtgaaactggccaaattctgcctttaaatggaaaagttccctcatgttccctttcaccatgggagctttaaaaactgttggctccaatggagccacacttttgtaaagcctccttcaaaaattattgagaagagggggtaccctgtagggcactttaagggttgtgggaatatcccccagtatcaatcagggtgcagactgtcagatccatgatagctctcaatttattatgtcacacaaatcaaaaaggaagcatttatcttatcaaaaaagtatgagcaggagagggagcgcgcattctggagcaggctcccctccccgaagcagcaggcagcgtgcctccacc

SEQ ID NO: 53288 - DNA, 414 bp, Mus musculus
  source 1..414: mol_type = other DNA
ggtggtccatctgctttaataaaatgtgtatcaccagaaatttcaaatagttgccaattagacccaattggtaagtataattaacaaaaatcttgaatttcctctagaaaattaaccatagatgctataatttcctttaaaaagttccagatactatgtaaggtatcaccatataaactgtctcttttaatacttgacaaattcattcaaggtagaaattgcatagctttattgtagttataaaatgatatctcagataagttatgcctttaatattatgtccacctacttaggcacctgagtacatacctagtcacctagttgaggactcactctgttcaggacttggctaagcattgctttgaacaatcctgaccgtgtaccatggctactgtcatcctatgcaaggaggct

SEQ ID NO: 53289 - DNA, 273 bp, Mus musculus
  source 1..273: mol_type = other DNA
aacctggtaatttacatttcagggtaaatttaacgtgccagtctactgcatcaggaggatttccatctgaaatgtgactccctaattatgaaatgttcttatatcttccaggccgttccagccctggaggaaagagttaacttaaacaattagccaaattgtcacttctgtcagagctatagctgtctctagtgaggtcagctattggatggatcacggggcccccaatagatcttgactctagctgcatatgtatcggcaagaggcctattg

SEQ ID NO: 53290 - DNA, 238 bp, Mus musculus
  source 1..238: mol_type = other DNA
ttaagagcactggctctgaaaagactgtgtctgcatccttccatgtcctagaacctgattgaggccacgactgtgactcacatacagagcatccgactgctcttctgaaggtctggctgataccctggagtgtctgaagatagctacagtgtacttagatataataaataaatcttaagccttgagggtaagggcccacccacggggagccgtgacccaggttacagctcaaactgag

SEQ ID NO: 53291 - DNA, 350 bp, Mus musculus
  source 1..350: mol_type = other DNA
cagagttcttaggacctgtcagctgtctcgccacctctccccagacaggtggccgctcatgggggtggcctagtattccagccaaaaaggctgccaggcccagcctttgcaggaaggtttctttaagagccttcccttccaggcggcaggtttcccagctgctgtaggcaggttcccggtgttcagagaacaccagccgcctccggtcccggtgggtggctgtgagtgaagaacaagcatacactttttttttttttttttttttgaccctgcagcccacgtccctactggggtaggggtggcaggaggtcagccgcctgtcacctgcgctcgctcgggaggggcacatg

SEQ ID NO: 53292 - DNA, 370 bp, Mus musculus
  source 1..370: mol_type = other DNA
ttgtaaataagtgaaatgcttaattaaataaatctctagtgagtagtagtccatctagagctatataaagtaaatgtatccactgtctgtaactccgagattaaataaattatagtaattaatacactcttcacaatcttgagagcatcagatggttgttagtgccatgcttccaacaacaggcacatcttttctttggagttcatttgagcaccagggaaggaaactcgcacctctgaggccaccggggagcgttggtcggggcgtggcctcgggtttgcggggcggaaccgcgcaagcgcatcggggccgcgggggcggggtcaggcggggtcagttagcgcgggagccgggcgcggaggctcctggg

SEQ ID NO: 53293 - DNA, 377 bp, Mus musculus
  source 1..377: mol_type = other DNA
ttttccatttaatacggaaccggatcttttgttagctgtgaaaaattttacaaaatttgactcacacttatattttagagcacaaatatgaaaagccttttggaacgcccttctgattggctgagccaatgccagtgacatcaaccaacgttctgtttcgtccctagtgcccccaagccacgccagctggcacgtgggccgggaggcgtaggcgcgcgcgcggtctgggcggcatctgcggggatgcgcagccgctggttgccgggctccgagcagcggaacggtcggccgcgcgccgcgcacctctccaccgaagggcccttctgactggcagggggagagttgaatcaccctccccactggccaattggaggggg

SEQ ID NO: 53294 - DNA, 397 bp, Mus musculus
  source 1..397: mol_type = other DNA
acagttaaattcgattgaccttactgttcagtaaattcgtttcttcacagtgctcagggcaacactgtgaagatagagcaggtctgtaataatgctttcagctatatcctatcaaacagactaagataatatttcccacttgagctaaattctcattcccgtgtgtgtgtgtgtgtttgaaagataatgacccccatacgctcatatgggctttgaggttgaaatgctcaagccagaaccagttcctgctgcctaaggatggagaacctctaactctttaaggagagttagatgatgtacccacctaattctgtatagggcgggaggtagagtaaaatgaggctactttcaatgttctcaccataatcagagtgtgtatttctcaattttcacaatt

SEQ ID NO: 53295 - DNA, 250 bp, Mus musculus
  source 1..250: mol_type = other DNA
aagcagaaaaaaactaatatacttttaactatttgatatcagggagcatgccagacattcttctgccagggttagcaacagaattccattcctttccattctaaagaaaggtggtcacacacacacacacacacgagagagagagagagagagacatgcagggaaagctgtcccctgaaataagcctggtctcaacccagcagagggactgccccttctaagtggaggtctggtccccagctttaaaatt

SEQ ID NO: 53296 - DNA, 320 bp, Mus musculus
  source 1..320: mol_type = other DNA
tgaatctggaaccaaataagttcttatattctaattggttgatatgaactttaaatcttcttttaaaatagtcattaggatgtctctcatgcctcatcagacagacattagtaccttctggcatcagtggaaatctgaataaatggtagtcaatatcatattcatttgtgcatatgttacaagagaggtatttggccttttagctaatggctctactatttgataggcaatagaactgcacagagcagtcatattctagaactgctacaggttcagttccaatctagacttgggaatgtgtctgggaaatgtagttggag

SEQ ID NO: 53297 - DNA, 375 bp, Mus musculus
  source 1..375: mol_type = other DNA
ataaccttgaatgcaaataaacctgatatataaaaataaaaattttaattacaacacttttaaaatccaaatggaagcctttattttattttatactccaaattaacgtagtgatcaaaaagtacagaagtacagtgggttacttttgttttttacacttcatgcagcaacccgcctcctccccgggtgggccggtgaagcgggcctggtgcagccatccggagcggagaagtgcgggggaagcctccttcctccgcccaacccagcggtgctgcggccctccctgacccggaagtgctcggcggcctcggcgagaacgcgcctgagccagcgcgcgcgcgcgcccccgcggaactcccgccggcggctgggctc

SEQ ID NO: 53298 - DNA, 610 bp, Mus musculus
  source 1..610: mol_type = other DNA
ataatgatagatttatctctccctaggtcagataaggaaggcttgtcttcatttcactagatgagaatatgcaaaattataaggtttcgggggaatatgacccttaatttttaaattgagaactcatggagctggcgcctgaacccaggcgcctgaaccggtccctagtgctcagggctcgtctggaagactcttttaagctcccgaccccgccttccagacgctttctgggtggggcgggttgggcagcgcccccagtgggcggccagacagacgcccagcctcaagctcacgcgggcgccccctcgcggccactcgaggagcgcagcgccgcattcttggctttcaggcccgggaacgtccacgcagtgtagcccattcgcagagacggggccggggatggacagaggaccgtggaggtccccctgtgtccccgcgggaggcagccacgtagtccattccaggctctcggccacgagagggagggactcgcggctgtggacccctcgcacgctcacgcgcgcccgagctggactgtcgcgtcgggcccgcgccgcgcgcgcgcacgcgggtgggcgtgggaggcaggggcgctgctgcacgcggcgtg

SEQ ID NO: 53299 - DNA, 502 bp, Mus musculus
  source 1..502: mol_type = other DNA
cattgtgggacataatgttcagcctgctttcttttggctggaaaagaagttcatgatcaccaaggcgaataattgctttttttcccctcaaagttgatacatatattataaattaccaaggcagattaagatttcatgccaactgcacagggccgccctgggaacctggcctggccaggaaagcactctgttccctcccggcagagctgcaccgacagagccgggaactctccataggatgcagattgcattcccgggcggtaacgtccagtgagggtcgcccacagcccctcctccgggcgtggtggaggaggagaacagggacctgggtccaccacgggtcccttggcgccgcggttgcagacagactctgacaacggttgagccgctttcccggtgaccccaaggcaacggcgcacttgtcaccgtgggtgaccgagaggggacggcggggggcgggccccgcggggcacgtgggcgcggccggcgctggccgcggcag

SEQ ID NO: 53300 - DNA, 189 bp, Mus musculus
  source 1..189: mol_type = other DNA
ggtttctctgtttaaccagactaggttaaattgcgccccgggtgcagccttgggcactaggcacattcctccttccccgcggccggtgagtaaaccctgcgaatgtttaccctgccccaccgctgggtggcgccggtgaggcctccccctccgccaacaggacgaaggtgatggccaccgcccatctac

SEQ ID NO: 53301 - DNA, 260 bp, Mus musculus
  source 1..260: mol_type = other DNA
cagtcctgactactcctcaatacatgtatacaatgtggtatacagtgtggctgagcctggggctacggaagaactagttttgttttgttttttaagcaaagctattttgatctaaaattgttgtcagcgaataaacttggggctgtagtgctggacctgcgcgcaggagcccagccgcggcgctcgggggggggggggggcgggggggggcggggggggggcacggccaccaggtggcaccaccgagtcctcgcgcgggg

SEQ ID NO: 53302 - DNA, 303 bp, Mus musculus
  source 1..303: mol_type = other DNA
ttcctagcacagtacctggtacatagtaagtccctgttaatgagatacaaagttttgtattaattacataagctaaaaatctgttgatctacaagtgaacattaaaatatgacaacttttttaaaaaagatgtcacaaagcttagaacgcccgggagttcattgttctcaatcacctagctgggtagcagtggctgcgctgctcgccccctgcccccgccgcggcgccgcagccatgacgcactaagctggcgccgcgagaacgggcgtgccagggcgcctgcgcgaaggggcacgcctgcgc

SEQ ID NO: 53303 - DNA, 228 bp, Mus musculus
  source 1..228: mol_type = other DNA
tcactgtgccctgtgagctcttggtatacatgatagctatatcatgctagagcgttatgaggacaatgcccttaggtcaaatgccttgggttgcaatatctgcacccccatggaattttcccagaatcagagtacagagcgctaaccttggcgaaatgtactttaagagtttgtagacagatgctaacgtctttaccccctggaggatgttacagtaacttccagtgg

SEQ ID NO: 53304 - DNA, 677 bp, Mus musculus
  source 1..677: mol_type = other DNA
gtggctccagcaggcgcgcccccattgtagctcaatggcgtcttgagagcacctgctatccttagaagggagacaagtggctcctcaaggaagaggagtcaagtctggcattgcccgactggtggccagggacactggcagcggcacgcgaggcttcgagactctgagaagctcccagaagctctggagctttggaggatcccgctaatctcagggagccgctagtcctggctgcacagtggcccgggcgcatctgctgctgcaaaccggtctggcttccttgagagcctgggcggccggcgggcggggcctgcagcctcccggagtcgcggccgccgtgcagcctgctcgctgcccgccccgctcggactccggcgcgccgtgcgggggcccgtggctgcggggcaccgccactcctcggcctccatcccccgatctcgcctcgccgcgccacccggcgctgtctggtcctagtggtccgcttgccgttctgccgaccagaggagcggcgggaaggaaggggaacgcggggacacgcacaccggccgcggcgcgcgcgcattgcacactcgcagccgcgcgtccccgtcgccgcgcgtccgagcccagtgtggccccgcggcagggcccggcacctgcccgcccccccaccccaccccccggcgctgctccggctc

SEQ ID NO: 53305 - DNA, 179 bp, Mus musculus
  source 1..179: mol_type = other DNA
agtatgtgtttgttgcagttacaacaacaatgaaaacaaaagagtgtatggcaaaaggttttagccagggctgtgggctaggcccctggctagctcagactccagtgccaggctgtcttctagtggagagtgggctagagcttggctttgagacactcccaaagagcaaggccagaccg

SEQ ID NO: 53306 - DNA, 725 bp, Mus musculus
  source 1..725: mol_type = other DNA
tttacttctatcaagcgtgcttttagtaaaaaatagtctggtggtaatatataaaagtacatatatatatgtatgtgtgtatgtgtgtgtatatatatatatatatatatatatatatatatatatatatataacatatatatatatatatatagtcataatgcctaaacgagttaaaatgttgcaaaaattaaataagtatatataaaggtccattaaaatgtgaagtgttaatataatctgagagtcatgtggttgaaaacatgaatttgcaaattttctaccttctaaatcaattctgtgtagcaactaactaaaccaaaagtcttctgtaaatttgtatttaggaatagaacttaaagtctcattaagacaagataggtagctttaaaataaaatcctttgtgttgatattagatttttgtattgtattatagtaattcttttaaattttgttttgttcagcatttaactgaagaaaaacctgatggtcaatgaagctactaggtattcatatttaaagcttatattaattaccaacctgttagaaaatagaaaaaaaaaagaaagatagttaagacaaatttgtttccttttccttagcattttatttaagccatttatattgtgggataaaatgaatggtagacataagacttacctgatctttatgaatttagaagagtctaacatttagaagcggaattgaagatagttaatttgct

SEQ ID NO: 53307 - DNA, 573 bp, Mus musculus
  source 1..573: mol_type = other DNA
actgtctcaaaattgaatggtactcttttttatgaaattgaaaaacaaacaatggtcaatgttatttatgtgcgtgtgtataaggacaaaccataacaaacacataaaggaatgttcagtattcccaagaagattcatgattatagttagtattctagagaatattatgaaccaataaatacaattattgatctgagtttaccttatgtccaagtaaaggagaaaaaaataaataaaactattacattgtaaaagatgagatagctataatacataattatcattgtagaataattataatatatagcatgacttcacaattactcttttccttgtgaatgaaagagatacagtggctaacagctgtacagcttcgaggcaagggagctcctagcgtcctaacagcaaagtgcagtttggcccacgggcagagggcacgcccctagagcgtgcttcacacccggggggtgtgtccctccgtaggggcgtgcctcccccgggaaagaggcctgctccgcgacgcgttgtggtgacatcatcagccccgcgccgactgaatcctgtcgcggaaac

SEQ ID NO: 53308 - DNA, 585 bp, Mus musculus
  source 1..585: mol_type = other DNA
aggtgaaattatctttaataatatgtttcttaacttaacagcttccaaaggattgtttttaacatgcaatcaatacaaaaattaagacattttgccttattttttttctgtaaaccaaaaattcaagtggccaacggccacatgtggcttgtggcttccatatctagactctgcagtttgacaagtcaacttggaccaaatatattacttgaaataggcactctgttgagaatgctgtgtattccctcaggttctaaaatgaaaagtccattataataatccagaccccgctggctgcttctggatccagcgctcactgccccagtcgccctccggctccggccgccggcgtttccggccagctctcgcggtccgcgctccgcagccaccgtgcccgtcggtcccgggtcagcggcgggggaaacgcgcgcctgcggccggcgactctgagtatccggagcgcggctcggcgcggcgtccacgccctcgccaagcgctcggtgcgtgccaggccgggcggcgccgcgggcggcggagggagcagagccctccccccgggagctgcgcggccaaggtggaaatgcg

SEQ ID NO: 53309 - DNA, 373 bp, Mus musculus
  source 1..373: mol_type = other DNA
ggatttctgatacacgtgaagcctcaataaattcagaaataagaagcttaggaatcctgacaaactgataccaaatattttgtgacagtaaaacttagacttatttttttaggtcaataatgttactactgatgtttttaaaagttcccatgtgtacttactgatgtgtgggaacttgcttcccagtatttaataatccagtattgagggagcaaaaatggtggctccttgtttaaattttcctcaacgaatgattatttaaaaagaatattttaaaagttctagttcaaaccaaagctactattagaaatactaagtgtaatgttttctctggtcatgctgacaagctcacctcggctgaggggaagtcagt

SEQ ID NO: 53310 - DNA, 579 bp, Mus musculus
  source 1..579: mol_type = other DNA
gtcagtttggactccagactcctcactctgctaggagtgcagagcggacttgaaacctcgagtctcctaacggcgcccggtaacaggcgctattaggggcgccgaaccccctccagggcgaatgggagggtcgaggtgcgcctaggagagtcgcggcggcgcgcaggcgcactgggctctccacggccggctctcgggtacaaagagcgcgcgggtggctcccggcagccgcaagttactcttgcacggccactgcaggagtttgagtctggcgctgcccgaggccccgcccagcgcttctcggtccctccccgcgagccgcccgccctgtgccagctccagattcgcggcgctggaggtgagtagtggcaacgctgcgctcctgtcccctgcagggacgatctggggcgcctgacagggtgcccagcctcacactcttggcgcgtgctggagcgcacggcgacactggccctgagattgccctgggaaggtccgtggggttgccttggctagcagtcgcctgggatcaccgctggcgctcgagggggcggcgcctcccgacctggagtggggcgcgct

SEQ ID NO: 53311 - DNA, 639 bp, Mus musculus
  source 1..639: mol_type = other DNA
agcggacttgaaacctcgagtctcctaacggcgcccggtaacaggcgctattaggggcgccgaaccccctccagggcgaatgggagggtcgaggtgcgcctaggagagtcgcggcggcgcgcaggcgcactgggctctccacggccggctctcgggtacaaagagcgcgcgggtggctcccggcagccgcaagttactcttgcacggccactgcaggagtttgagtctggcgctgcccgaggccccgcccagcgcttctcggtccctccccgcgagccgcccgccctgtgccagctccagattcgcggcgctggaggtgagtagtggcaacgctgcgctcctgtcccctgcagggacgatctggggcgcctgacagggtgcccagcctcacactcttggcgcgtgctggagcgcacggcgacactggccctgagattgccctgggaaggtccgtggggttgccttggctagcagtcgcctgggatcaccgctggcgctcgagggggcggcgcctcccgacctggagtggggcgcgctggagccggagtgcagtgcagtgcagtgcagcgcccttttccgcagtaggaagcggcgattagtgctcctttatcccggtcccggagcggcaggtgtgggtgc

SEQ ID NO: 53312 - DNA, 398 bp, Mus musculus
  source 1..398: mol_type = other DNA
taaaaatctatttacttatgtattccaagacagggtctttataacaactcattacgtggccatagactggccttgagccttaaaggaagttgcatcagacattgatctatctggagccaggtgaaagcccaggccttcaacttttggggcgcgtgagccccacgaactgcaaaaacacaagactccggcttttctgtctcactcttataataagagggtgggaattgctgccagtctctccacacagggtggtctgcacctcctccccattggcgctcagctcaattccttggagctgggctgcacacgtgaggtttgtagcaattttgcagctggtgcaagcttgcactcagcagggacagtgggcgtggccacgccgcgtagcgccctctcccgcc

SEQ ID NO: 53313 - DNA, 471 bp, Mus musculus
  source 1..471: mol_type = other DNA
atacttggtacccaggataattgtaacaggtgacttgttgctagagaaagaaatatggactccagggtccctttctggtcactcgaagtagctaaatgggttcagggggcattaacacccgactaaatccactcccttttcctatggaaaatgacgcagtgggttgaagatccgtggcaagggctcattggttaccggtcacctgtcaggagctaggctgagaagtgcccttcagtgctcgggaacagtggccaattgtggctggctgagtttgctgggcctgcctccagaacacagactctttgatgaagtgtctggccccggggacaggctgagccctggacaggctttgggcttctggcaaaagtcgcacagaagtgaaggcggcttcctgttttcattaagattgcggggtgacggcggcgggacgcggggagccctcattggtgcaggctgggcctatggtgtccc

SEQ ID NO: 53314 - DNA, 391 bp, Mus musculus
  source 1..391: mol_type = other DNA
agtagggtctattccttattcttaagtaaaacactgaactgggcaattccggaccttggctgattcagtggcccaaaataccaggtaactttggggccagtttaaatttaaaagaaaattggttgtcttcctgaagcctgacagattaaaaaaaaaaatactcatttttcttctgtagcaatgaaaaagaaactagattacccggttctcccggggccgaccagggtaggggagaggcctgccggctggcttacaaacacccacccccggtccgcccagcgctcccgcggtaccgcagcggcgcagtccctcccggctcaggaaggggtaacagagcgcttggcagagggggctgtgagcgcccccgcctgagaggccaggctgcaggtgg

SEQ ID NO: 53315 - DNA, 309 bp, Mus musculus
  source 1..309: mol_type = other DNA
ccagacaagtcaaggcttttccacagccagttaacatggccatgataaatataaaaatgtcgaaggtacaactatctttccttttattacaagggaccttgaaacctcgttttccaaacctaaaccgatgctctatataggacacacatcagtagtgcttgagccagcttcaggatctgtggtccaaagaggacggaaaaggtccggcccggacccaggactccgcctcaggcgcaccctgtgtgcacgccgattggccggagcactagggctgagcgccctcctcctcagcccagtggaagctccctt

SEQ ID NO: 53316 - DNA, 480 bp, Mus musculus
  source 1..480: mol_type = other DNA
agaaccctttaaagaagcatcgatgggatttttaaatttagcttaaggtaatagattcaaacaagaagaaagttagttttcttgataatcactcattcacacatgctaaaaggctgctacgttttaaaagtttttgtataaatgcttgcttagattgaatatttttttgtatctaaatatccactgataacaggaaaccgagctcacagatatttgtaagacatctcagagtgcccactttagagtggcctcttctcgatggttaaacaccggagattatgatatcatcgatagaaatcaacgtagttaccttctcgagaacaacgcgatgtataagaagaatcagcttgttctctaggacccggctgcagcgaaggctggcgggtggactccggcggcgcagtagcgctaaagggagcttccactgggctgaggaggagggcgctcagccctagtgctccggccaatcggcgtgcacac

SEQ ID NO: 53317 - DNA, 289 bp, Mus musculus
  source 1..289: mol_type = other DNA
ctctgcaggctcgagctggcaggcgcaggcccttcgcttcggggggttcccccagtctcctcggagaagctcggaaggcccagcagggcctgcgcagtttctctgctccaggcacaaacacggcggagagccggcgcctcgcctgctccccccgcgcgctcccggagtcgctgagcagggcgagtgacaggagcgtcccaccaacccgcgccgggccgggcagggaggagcggctcgcggggccaactgcggcgcgtcttccggcgcccgtggaggcggcgagggtggg

SEQ ID NO: 53318 - DNA, 230 bp, Mus musculus
  source 1..230: mol_type = other DNA
agacaagaacttatctaataattgtgtctgaatcctcccaagtgctaggaggcacctatgagatctctttttattatcaattgctatctagaaatacttatttgcaaattgtctaagccagtataatcacttaaagtatgtgttttttaaaacaagtggtcttcataaaatctgagggttagttagttacagaaatggcaccatcagattttaacaactgttttatttgg

SEQ ID NO: 53319 - DNA, 408 bp, Mus musculus
  source 1..408: mol_type = other DNA
tccccaaatgaataataatgatatcttaactgggtttaaccatctttagactcataggttaaaactgtttctaaaccgagtgaggccagcctggtctattctaaatttgatacctctttaacatggcatgctggtgcccttcatggatccacaatgtatcccatccatgggctgaaacatgtaaagggtatccattagagacctctttaaggtacattatttctccattcactgtccatgctatggacctgtatttttatgcttcataagtaaaaataggaagaaaaataaggcgttagaaatggttgaatttcattctttagaagaaaaaagtagacaaaggtctctctctctctctaacttattctggagtccgtcattttcctcactggaggaatgaactaagga

SEQ ID NO: 53320 - DNA, 322 bp, Mus musculus
  source 1..322: mol_type = other DNA
aaataccaggtgtactatcagaatatgcttggatagtgagagggccctatcacactgcctgtgatgggggatgtcacgtgtaactccacccccgccccccttccctcattcagtgaaagggatgacagagaggcacgcctttacaagctccggtgtctgctccggagctggtccctgcatggccgcctcccggcccttaagaatcattggagagcaagcctcctgtttcgtgaaaacgtatttttcttttaagcaaaattgaaagaaagaaggaaggagtaatttctagcttcattcaaggaagaaaaaaaacgtccggacc

SEQ ID NO: 53321 - DNA, 354 bp, Mus musculus
  source 1..354: mol_type = other DNA
ccctccttctaagaaagattgaagtatctacactttggtatacactaatcagtgagtgcatatcatgtaagttcttttgtgattgggttacctcactcaggaagatatcctactttcataaattcattgtttttaataggtagtactccattgtgtaaatataccacattttctgtattgatgtgattgcaaccactctggaaatcagtttggttattccttagaacatacacaaagcattttcaaggccagcttgctgtccacaccttttctaaaaatcattcttccatttttaataaagttcattcttaagttcacaagacagaggccccagaagtcactgacttagggtgg

SEQ ID NO: 53322 - DNA, 363 bp, Mus musculus
  source 1..363: mol_type = other DNA
atatgtacttactgataagtggatattaacctagaaaaagaccaaagtgtggacactttgccccttcttagaattgatggaccatctagagatggccgcacccggggatcctgtttatgccagcaagattttgctgaaaggtgagcctatgccggtgcctggcaaacacagaagcctccaatcagaagttggcctagtctgccatcataggaaaagacaatcaatcataggctttctttctctctgattcctgggcatcataagatgttctgaatgggttgaaacctttgaactgtaggcaaaataggtcctaccttccttaagtggctataaccgatactgtgtcatagcaaccaaagttgc

SEQ ID NO: 53323 - DNA, 461 bp, Mus musculus
  source 1..461: mol_type = other DNA
ttgctgggagggttgttaagcttttaattacaggccctcaaactatcattttgtgcaattagcaattaactctaatcgttgatgagagaatgcagaggacaagccacaaccgcgggagcgctcttgtttaaagccacatttaatttttaacaaaatggcatctcagcttgccattgagatgggactccgagcacccctcctcttcatttggaaagaagagtcccccggaagatgctatcagcccttcctaggggctcaggagagggaggaaaagggttccttgctgccccccacagccccatcaagcctggaggcggtggcagcacagcgctcctagccaaggcgccaggagggtacagtagcaactgtagggagctagggagcgcacagctgctgcggccgcaggttccctggatacggtgcgcgagccaaccagcggccgccccgggtcccccgtgagc

SEQ ID NO: 53324 - DNA, 255 bp, Mus musculus
  source 1..255: mol_type = other DNA
ctccaattgataggcacttgcaaaggaaaacttagttttctctaagggagactcattattttttcccccttagggaaagacagaaaggatcagaatatattgtatgaaaaaaaatctattttcaataaaaagaaaattctagaaaattccagggcaaggctgaccgacatttttattagcaataatctctgccttcttttgattatctggagatttaagaccacataatcaccctccacgtcagagggggtgggg

SEQ ID NO: 53325 - DNA, 201 bp, Mus musculus
  source 1..201: mol_type = other DNA
ctgaagcaccagatgctgaagatacatgggacttttcggagtaataccttaaatatatatacacatttatggaaagagcttttcacaatatttgactgacgctaacccagcttgcagacttcgctctgggtggccctcgcgagaacccgcgtcgttccttccacgggacggatcccttcgaggggaactacggatttcgtg

SEQ ID NO: 53326 - DNA, 499 bp, Mus musculus
  source 1..499: mol_type = other DNA
tctgaaagggtagagccccttaaggacctaccgagggctcggttccgcagggaggtagcggccgcgccgagcgagatgggtcaccgttcgcgcgcccaggctctcgctccctaagatggcggcgggagcaccgctcacaccccgccgcccgcgctcctcaggaccccgcggcctcgggaggcgcgagaaagcgaccctggaggcccgcgccggccgcagagagtctgatattagctggggccgcccaggaaatgacgtacgccccggggtggagcccgctcttcaaagtggggtctgcctccgcggtagcgcgcgcggctgcggggcggctgggcacagagctggcggcagaggcaggcggggctcctttgacggaaagtagccctcagactcgccctgaccccgggcccgccaagtcaaaccgacgtcggaatcccgaccgcagccccccgcccgggctccgagctgtcagtcacggcgccgaagccgcttcttccgg

SEQ ID NO: 53327 - DNA, 252 bp, Mus musculus
  source 1..252: mol_type = other DNA
ttctttaactttcagtgacaggcgatcaatgacactgaattgtctagctatgtaattgtatctactgtcaaatccaactcaagcagttactataaacttttgggaacaaccaagttgccctgttgcccacgaggttataaacagtaagggcagcacttcccttgtatatacctaaagcagagtttcttaaaggtagctgtgtgggccacattattatggggaatacaggcagaattgtggttccctgagcca

SEQ ID NO: 53328 - DNA, 335 bp, Mus musculus
  source 1..335: mol_type = other DNA
ggtgatttttacaatttttaaaatcacaattgcactcattggaatggaatctatactattgttgaaactcagaaaatatgaacagctttcttgtttagttactattttcccaagcttaagaaagtttttcttaagatctgcagtttattaatagcccctttcataaatgcaatgcaaaaagcaagacttccaaggtttactttttacactgtgttaaaaaatattctttatgaccattaaactggttttgctctgtctgtctccaggtactgattcttgtccggaaatgacgccatccggctcctcggcccgccctccgggatggcagtgcggaa

SEQ ID NO: 53329 - DNA, 450 bp, Mus musculus
  source 1..450: mol_type = other DNA
ccacacagttctctctctatagatcatttccagggacagcctctgcaaacttttgcaggctgcacctgctttgtgtaagaatttttaaactaacccaaattcatttttacaatgaatcaaaattcctaatgtctaaaacggcctggctacttccatttgtctggagttcaccttcgggccaagcccataacccagagaactggtccactggagatgttgaagtcctaaagctctaaggaattggaaaggtgtcctctccaattgcaattgctggagtgcagtccctgcgggcactgctctggagaattccggaagtgatcccctacactctatcccatgggacctagcggatcggcccgggacagtgggtgaacacccctcctggggtcctcagcacgccccgcggggggtcttgggtcctagcctcagggatctccggaggtgaggcct

SEQ ID NO: 53330 - DNA, 357 bp, Mus musculus
  source 1..357: mol_type = other DNA
cttagttagtgatatgcgaggccaggctggtctacaaagtgagctccaggatagccagggctatacagagaaatcccaggtagcaaagtgtgtgaccacacaagccttggtccgggcagatcctgtctgaccctcgagtcagagaataatcccgctggctctgaagcctgaggcccaaggctcgcactgggctagggctgtgcgtccccggtcacctccaccgggagcccaaggggacttgatcgccccacgcgcaccatcccgccgggacgctccgccctccgtctcgctggttggcccggtcgctgcagcgagcggcggcgggaggagccaggcgcgcccgccacgcaaaaccac

SEQ ID NO: 53331 - DNA, 574 bp, Mus musculus
  source 1..574: mol_type = other DNA
gtcttggtgataaatagctgtcaaatacacagtagactttgcagtgggtcccagaattcccaaagttgcccagaggggcaactagatggctctgggcatcctcgagtgtggaatccttcagacctcaaggtgtcaataatcaatgagatggtgtcactgttgattccacagtacactgacaccagcaatatccacaatgctgtactgaccaggtggtttaggataaaccgcgacaccagggcggccctcgtggcgtggcccgagggggcgccccagcagcaggtagcagggcgaagagcaggttcatcagcacttcgcgcccggcccagctgtcgctcctaagcaggcagtagagggtgcccagcagccaggggatgccatgccctgagatctccagcagcttcatcaggggccgcacgctgccccaggccgagcccaggaaggacgggttcaagttcatgcgggcgtcctccggcggcggggccggggctgcttgtgcggggcccgaggcggccagcgggaaggagccgcgccggtgcaccgggctgtcggacgcgcgcagccgagcgcaggc

SEQ ID NO: 53332 - DNA, 416 bp, Mus musculus
  source 1..416: mol_type = other DNA
tctgccttcctagtgctagcagtacagacatggatgttaaaagaatctttatgtttcagggaatttttgattggctaaaaaaaacactcgcattctccttttgtttgctgttttgttgttgttttttaagtaacatataatgggaaaatgtcatttctcttgccagtgaagaaatctttttctgcctacagtgtaactgctgttttggcaaatagtctctttagaaatgacctatttgtagttagcacactactcatggtcacaggaatcccagtgtctggggccccttaaactgttaaacatttgaacacaataattggggccacagtgtgggacaggttcccggacccttagacagtcactgggccaggctacgtctcagcctctggcaaccggacgcttcagccttctgaaag

SEQ ID NO: 53333 - DNA, 328 bp, Mus musculus
  source 1..328: mol_type = other DNA
tgggctgagacagaaggcttggtgtcagttctctgagctcagcgagaagaaaccaacagagcaggagaactgatgtggtcctctggcctaccttgccaatcaatcaaagcttgaaagactgatagtctgtcgtcttatctgattgcgaatagacaacaagctaaattgttaaacgtgcgggttgtgctccctggtcctagaaactaaaatcagggcctttgttttttgtctcaaaaagttcacgacttgtctcaattttgaagttaaaggaaagtgattcgtccagacgtggccacgcccggtcacgcccccggaaatgacgtcccgg

SEQ ID NO: 53334 - DNA, 414 bp, Mus musculus
  source 1..414: mol_type = other DNA
gaaggcttggtgtcagttctctgagctcagcgagaagaaaccaacagagcaggagaactgatgtggtcctctggcctaccttgccaatcaatcaaagcttgaaagactgatagtctgtcgtcttatctgattgcgaatagacaacaagctaaattgttaaacgtgcgggttgtgctccctggtcctagaaactaaaatcagggcctttgttttttgtctcaaaaagttcacgacttgtctcaattttgaagttaaaggaaagtgattcgtccagacgtggccacgcccggtcacgcccccggaaatgacgtcccggccggctacttcttcttccgcagtccgccggcggcacagtccaggcctgctccgggggtgcatcggcttcgcctaacgaccgtggccggccgggcggct

SEQ ID NO: 53335 - DNA, 472 bp, Mus musculus
  source 1..472: mol_type = other DNA
ggagatagactgtttctctccggactaagagaaaactttgctttttactttatacatttaaaaccttgaacaggtattatttctgtgtaaataagcttcaaatgaattttcaaaataggcactagtttgaaattgaaggtcaacactattgtggagaaacacatctagtgcaagcttttaaaaaatagtttacagctgttagttggctggcgcctggaatcaggatgtcaaacttaagttaaagttatccttgaatacatacactgtcccaaaaaataaatttaaaaatgcttttcttaaaatagaacttaccacaaacccaccctttgtaaagtgttggcatacttgaccttggctagccctggcagagccaaagcctgccttcagctccccccggctggacccccaccgcagctgccagctgtgtcgaagcttctaaaaacaaagccaagggctttccttcagtctttga

SEQ ID NO: 53336 - DNA, 204 bp, Mus musculus
  source 1..204: mol_type = other DNA
tggccaggaaagacgtctatcctctaagtacagtggcacacagtaggcactggaagttaaacctggtgaaccgcatgctgcttcctgttgggtgcagacgggcgcagcctgcaggctgggaccaggcagcacagggcacgaggggcgcggaggggcggtgcagcagccggcggggcggccccggtggccgtcgctcacttccgg

SEQ ID NO: 53337 - DNA, 470 bp, Mus musculus
  source 1..470: mol_type = other DNA
gtctggggttacagcccgtgaatggctggaccactgcgttcctatttagaaacagtacaatatttagaaaggttttgtagtgcaagcttggatgcgtgcatgcatgagcatgtacagatatgtcttgacaagaggcccctcattacaaaataagcagcggtctcttgtgcaatttcccgggagtgaaagattgcaggctgcgaaaacgcgggagaggctagctagcatccttgcccggggctgccgtaggtacgttgctaagtaccaccagctgtgggcacacagacagacccccaaggcgtctgggcgccggggtttccccgcagcactaactgggtccctccagccgcgcgctgttgctggggcccgggcaccgccctgccaatggtagtgtgcctcggaggccgggccgccccagccaggggaggaggcgggcgggcggccgctggctccgccccgctcccctctga

SEQ ID NO: 53338 - DNA, 208 bp, Mus musculus
  source 1..208: mol_type = other DNA
ggtggatgcgtagactcgaccaaccaaagctcatgacccttggacagcaggagttctctgagctctcaggcacgcttctatcctggagacaaacatggagctggaagcttctccatcctcataacaggctcacgtgtagggtgtgcatgtatgagcgtgtactcatgtatacacacttacacgctcacagatgtagctctgaaaggta

SEQ ID NO: 53339 - DNA, 654 bp, Mus musculus
  source 1..654: mol_type = other DNA
aaccagatagttccaggactggatcgtactctaagaggtcttttctggtcatctcaaaataacatctccactctttgtgtgtgtgtgtgtacccgttactggcaatcacacacaaagacagggaggtacttgggtctcagcgcccggtccacggtgccacgtcccctgggccgagcgcttagggcagggagccgtctccgcggaggcagcggccgccaatcctatcagctcggacgcagcggggccttcccggccgggctgactcattccctcctccgcgagccgaggccgcaagcacgctgcgcccctcgcgcgctctcgcccgggggctgccccgggaatctccacgcgcgcctccgcttccccggagcccgcggccgcctcccccgtcccggcccagccccgcagagcggccccgcgggcggcgcaggcgcagtggggcgtgccggcctccgcccccccgccaacccccgccggcttgcccacgccccgctccgccgctcggggccgctttcccgaagctgcaccgcgccggagcccgccgagcagggcagctgagccggcgtcgcggggccgagcggaggcggcgtgcggcccctggagggcggagacgggctcggcgcgcggtgggcgtggcgtggggcagaaaggggg

SEQ ID NO: 53340 - DNA, 571 bp, Mus musculus
  source 1..571: mol_type = other DNA
aggtgtttgaaaagtcacgtgttttagaattctaaagtgtaggaatacatttagataatattagaatctcaaacaattgtatgtgatgtttctccatgtatgtgtatatgtacatacatgattaagaaatattatagcagctttttaaccttcacttacttgacatcatttcggtgtcagggaccgtggctgaaatagggaaactttcagtctagtgtacctttgagaggtcagaatgcaggttcagaattaagcacttgaaactacctccatttcaagaactagtgagcttaatacatatgcatttgccttaattgactaatcagttttgctcaacctatttatattaaactttaatttataccttatatttatattaaacttaatatttatatttaatattatgcttaatatattcgtattatatttaaaattatttatattataataatatttaatattattaatttatatttaaacttcatatttataccttaacgcattctattttcaatatttatctatgtaaaattaaagcgacaggtttaaactgccaaggaacttactttct

SEQ ID NO: 53341 - DNA, 256 bp, Mus musculus
  source 1..256: mol_type = other DNA
agtaatttttaaaaagggtttatttatttgactggtactgatgttggtacaggctctcagtaccaattttttaaagttaaaaaatataatccatgaaggagataagtttctcaagaagacattttaaaacttgcatttctgaggccgcctgttaatttcaactttaaaagaagacattttaaaacttgcatttctgcctgttaatttcaactttctggggcggggcgggggcggggcgacggccgttgcagcgcgc

SEQ ID NO: 53342 - DNA, 374 bp, Mus musculus
  source 1..374: mol_type = other DNA
aaaagttatctccatataagcaggtaaacctttggataaaagtcaacactgtatcattatttaaagcaagttacagaaagaaagttgcttgaaagcatttcctgtgatacttagaacaagacaagggcattgaagactttagactatgattctatctattatcaacaggattttaaaacaaccgtactgaatttgcttaagagaaataggtgaaaagtcagtttccctcttaatttcttctatgaccggacctaccagcaattgcactttgcttgtaacttattctgtaattaagaaaaaacttcaaatccaaagtgattttgggatataagctggaaccatcaacactggtgctgagagctcccaagggagcc

SEQ ID NO: 53343 - DNA, 301 bp, Mus musculus
  source 1..301: mol_type = other DNA
aaccctgtgtgtttaacattcttggttcccacagtgtttaggtacaacgacctctgttcctcgtacaggttacagagctgggaacagaacgggtctgcacgtatagacactacttcctacctttgcaattttcccatccaagtaatgtttggaattgccttctctaaggtgtggagccaacacatgctaatgcagcctaaaggttgtgattcaatactttactagtaatcccggctccaggcgcctgcaccggaagaacaccccaggcctccgcgggcacccgagcgcttaagggagcctc

SEQ ID NO: 53344 - DNA, 375 bp, Mus musculus
  source 1..375: mol_type = other DNA
taaaaatatatttccaaactgagtcatttgcttgatattaactctataggttgtataactctatatgtaaagtcatgtcaagactattctgaagataaaatttaagtcagagatcttatgacttcagatattttgcttctaaagcgctcactgctcaagcctgaagatttgaaattcgggtcctcattacccataatgtgatggcccatttctgagaccctagccctggcagcaggggcgcggatggggatccctggaccacgctggccggctagtttggccagctgcgagcccgaggttaggtaagagagaccctctttcaaaaaagaaagctaatgcaggtttcacctctatagaccagagactcacctgcca

SEQ ID NO: 53345 - DNA, 353 bp, Mus musculus
  source 1..353: mol_type = other DNA
ggccacatgggcctgagtgtgtagactgactttctagattagaagtgacccagaacttctgaatttacttggaaactaacaatttatagatacaattataattgatcagggctgatgcctttatagaggactgccatgtagctacctggtgggtattccattcaatgaggccaggtctctcagtcagacccggagcttgtgataatggctagtctcattagccagcttgctgtggggaatccctggtacatgtggaccaggggtacaatggctctagggtgcctggcaggcttccaggcagcatgcttttctttttaacaggaaaacagcttcaaggatcgtgaacatcattt

SEQ ID NO: 53346 - DNA, 350 bp, Mus musculus
  source 1..350: mol_type = other DNA
tgtcttcagggtccctcagaagtgcttcagcaaggcatatctgaggcgcttctctggaatttatgccagtgaccacaatcctggagagcaagtctcgattatgcaaaaacatatctaatacaacgttttgtactcttcatgacacatacttaccctgtcactcagatgctcagtcagaaaatcactctaaagactcttcattctgagaacattgaacaaaagtttttgtgttttgggaaaggacccttgcttcttgaagacaacttccccaagcagtcgtcagaaggggcgtcacatgttcagccacagcgctctggcccatctcctgaggccagcaggatgctggcaag

SEQ ID NO: 53347 - DNA, 562 bp, Mus musculus
  source 1..562: mol_type = other DNA
tctgaaaaatagttttcaggtctgctgaatgctgtgttggcctgtgggacacaccaggacagagattctaaagttacattgttattaaaatccggattgttactttgttgttacttttaaactttgaaagagttacaaaaagctgcagctatttttagtctggattttcctgaacctgaagcactttagtgactgaataggatttgtgggtacagactcgaaccccaagccttggagtcgcagcccagctccaagcgcagcccgggagtcacgtgacgcgcgctccgctcgccccgcccccttcaaccccgtggatgtgcaagtgggcccggccgctccgattgtcactgactgagcctgtcgcccgcgccaggtcgccagccagcaaggcgtcccgagccctcgacgtcctgccccgcggcctgcgttctgacgcggggcggtccgagggagccgggcggagcctccccgcgccgtgcggcgtgctgacgcgagcggcgagcggggcgggccggcctcggctcctcccgccgcgggcccactggccgcccgcctcccccac

SEQ ID NO: 53348 - DNA, 417 bp, Mus musculus
  source 1..417: mol_type = other DNA
gttgttcaactgctcataaattgaaaacggatctcacttaggtaccaacttttaaaaattcaattcagcacggatctgagtatcacattgctggtttagtaacctgcggttttcatacctttctgaaaattaggtcagccaaaacttagtgacaaatagcctaactatgtaatagtaaaagagaaaccaattaaattgcttaaattctagcatctagtactgtctctctgaatgcagtaaaactcagaattctgtaatttttacagatgtccaaaagcctggaaataataatttcaggtgcggcgcggacagcgtgagctccccgactcgtctttaagttttcagaaatcaattaccacaggactgtaaattctgacacttggtaaagaccggagcggggacgccacagctgccgga

SEQ ID NO: 53349 - DNA, 393 bp, Mus musculus
  source 1..393: mol_type = other DNA
atttgaaatgtaaatgaggaaaatatctaataaaaaatgaaatatctaataaaaaagaatatttcttcggaacctttgttttactttatgttcttcaatattaaataggaatgaaaatattttcttttcaaagtctgtacttaagcagctattcattaaattataggtattgttatctgttaaatgaaaacagcactagcccttctacgtagaccaggcaggcattacaaatgcttttttttttttttccaaaaaaattttttttaaaagacaggatctttgttatggatagtattcatcagcccagcgcaggataaatgcgtctgctggcaccaggctgggtgtcagcctgtgccacctaggaggcgctgcggaggccgcggtggcccggac

SEQ ID NO: 53350 - DNA, 365 bp, Mus musculus
  source 1..365: mol_type = other DNA
caaactactctcaggagtggggcctgtcctggaatgtggtcacaccagtgtgatatgtgacatgtgacactcaagttgcacttagagctgagcattccacagccagaggaatttttctagtagaagtattacattagacacatgataaaaatacttgtttatctgaaatgtaagtttaactggatatcctgtaatttacctggcaacttaagcaaagccatcatccttccttttttttttttaaagggtagaatgaagttggtttctttcatgccaaataagcaatcacagacccaaaactcatgactatcatgagactcaagatcaagtacggaaaaaaaaataatttttttttttaagattaa

SEQ ID NO: 53351 - DNA, 722 bp, Mus musculus
  source 1..722: mol_type = other DNA
tcgagaactagagttctacctggggttttttttgttttttttgtaaaaaacaaaacccagtcacaggattgaatcttgttcactctcgttattcacttgtgttaacaaaggttatctagtaactgccttgagaaaactaacagtaaaatttttagaactagtaagggaaatgcgccagcgcaggcgccgcatattgatgacatcattagtccgcgccacaccctgggcctccgagcctgtgggagagccaagtcagcggggcggggccatcccgtgctactacgcatgcgcgccgggcatggcggtcgcctctctccccggctctccccggccgggggggctgagtgccctccccctttcctccccccagcggggcttctaactgacagtcgtcgcccggcccggtccgtgcgccgcctcctcctgcccgggtccccccgcaggtagacaggggcgggagggaggagccggagccgcggcggcccggggctgcggcccactcgggaaggagccgagccctcttagtcctcgccccctcccagcgccccgtcggcccgggagggggtggggcgccgaggccccgcgggccgggccgggtgtggagcgtgcagccggcgcgggccgcgcgccgccggggggaggggagaggagggcacctagctctcctctcccccctcccccgcgcgccatgtaaccccgcccctcgggcgcgagcctgagac

SEQ ID NO: 53352 - DNA, 364 bp, Mus musculus
  source 1..364: mol_type = other DNA
gatctgatctcagactgttattataattatggttttaaataaccctacattaaaaatacatagccttgggtaattaggattctaataactgaactgtcatattacagtttagaaacaatgtatatagaagaccaggattcaagaagcttcattatcattaggacaagagattgggatgtacgcccgagtttgaacatctcgggttctatattatggttttactcactatacccagttaacaatttaaattgtataattcggtagttctgtatgtagacttgcggagcgaatttctcccctgccagcttcaccccgccgcagcggagagtgggagcagcgccccgcccatccccggcgtcgcctc

SEQ ID NO: 53353 - DNA, 210 bp, Mus musculus
  source 1..210: mol_type = other DNA
ttacatcatatgaagtaccttagtctaatcatcaatcatttagagtagataagctccctacgattttattataaaagaaattgaaagaaaaaaaagtttaacttaccatgagcatttggaagttaaaatttacaaccaacgctgaccagccctgtcaggtgtcaacagacggcagaatgctattagcttattgcaaagaagtgagaaaag

SEQ ID NO: 53354 - DNA, 440 bp, Mus musculus
  source 1..440: mol_type = other DNA
aataactattaaatcacgaggtgcatgcacctcttgatccagaggtaaattgcaaattaattataaattaatgttagcaaggaacttcaacatttttaactggtttattttaacttacaagattgaaagcagaaaacataggattccacttcccaattagaatggctcagtgggtaagagcacccgagtgctcacatggtggttcacaaccatctgtaacagtgtactaacatataataaataaataaatctttaaaaaaaatttttaaaaaaagaaaagaaaacttgagagcatagatactttctagacatttacatattttctaagggcacgcatatatcctttttacaatcagaaaaatatttacctgaaagcatctgttttaaaagttacatttaaaagccagtaattaagtacttctgttaccaaagttgtttaa

SEQ ID NO: 53355 - DNA, 259 bp, Mus musculus
  source 1..259: mol_type = other DNA
tatttcaccaaggatattctctgtggacagggatctatgtgacacatgacacgacttcatctaatcagctccagtctgcttggcagatcagctgcagcaactggcaaccctttcagaatatgaatagatgaaacacaactgtggtattaaaaatgctgtctgttgcaaaagttttatcaaagccaattatggctgcccagcctccttaagagtaactgacccccagccctttgggccggaagtcccgcccctgaggcct

SEQ ID NO: 53356 - DNA, 331 bp, Mus musculus
  source 1..331: mol_type = other DNA
agtatctgtttaggtttactcaggaaataaaaatatagaagcattcggcatgtatgtgatacacagacagacacaaatcaataaaaaataatattaaatctttattaaaagattaaagcataagatattttaggggctcttcataactatgaaagaacagtaagtggagaccagctagctgccccaatgggccctacaacccggccagtgggcctatagaggggatttgggaccttttccagcatcaggcaggggactccaccctgctgctgaagggagagagaaagggagggccctgcctcgcccccgccctgcaacccattcccattgg

SEQ ID NO: 53357 - DNA, 662 bp, Mus musculus
  source 1..662: mol_type = other DNA
tccttgtaacaacaaatagttgatcccttcatgggtcagattgccttatcaactaaatgttttagttaactaggaagctgtcgaggtaacttagaggctctaggtatatatatatatattcatatctcgagctgactaatcaatttggttgtatcctcatgggaatgattagtactgacattacggataccggtgaatgtaagataccctgagtgtgggggccgtatccggaggtgtacagtcctgcaaagccaggatccctgcggctaaaggcgcccttagcgcagaaggcccactcggccagctcccgctccggctctccggtcgggaaacgtgggtgcgaggcctctgccctggggcctcccggaagcgggtttcctcggcgggaagcacgtccatcaagccgacgcgccccgggagaggccgcgtggcgggcgcacaccctggtgtgaagtctcgggaacgtaggctgcatcccagcgcgcagcacggctagctattgttcgtgcgtttttgagaccatggagtctaggcctcggcacagggcgagctggcctcggcgagcctgcccaaccccgccctccccccctcccatattagcgccccccaggctgtgcgtggggcggagccccgcgtggatctcgcgagatccgggttggcgc

SEQ ID NO: 53358 - DNA, 487 bp, Mus musculus
  source 1..487: mol_type = other DNA
tatgtcaaccaataatttgttctccatggatttattaatcatttcatagagtaatacagtttataaacacttgaaatagagctttaatttaaaacaggacccatgagatttgtccttcattgcataaataagtaattttattttattttttagagttttccattatatgacatatcatattttgggttaaaaaactgaagcttccaataattattacctggcttcaatgaaatcatgatcctaaaaataaggaaccagacccatatgataattatcaaatgattccaacaatgcattgttatcattacaaactttaaataagatcttggtaagtttctccgagatctgaagactatagtgtggagtccagacatatatatgtgtggcaagcaaggaaactgacatgactaaccacttgaacctgcttgttagggcgctgcattaaggtagacagccatgctgcacttactgcaggcctctggtgaat

SEQ ID NO: 53359 - DNA, 203 bp, Mus musculus
  source 1..203: mol_type = other DNA
cttactttccagtaagaatgacaggacatgtcaattttaccgacataataaaatctttctggtgaactgaaagaaaacataatcaaaccatttgagcaggacatgatctttagtgaaacttttgctaggagattgaatttcatattttttgatcaaggagctgtggtctattaccagtgaaactgggaaacaagcccaggccg

SEQ ID NO: 53360 - DNA, 328 bp, Mus musculus
  source 1..328: mol_type = other DNA
gactgaccaggctcagggaccctgtccgctctggctcagagccacttagttcatcattgaccagattcaaagaaccacattaaatagtttgattagaattagttcgcttttcacaaaacctttgatgatatttaatactgaatattatttgaaacgtggttttgtatattctatcacttttaactctgacaaggatttcagacatttatttatttatttatttatttatttataagtttgtaatgctctagtgctctagtgacccacactctaaaggggagagtgtcaaagtcctccctgctttcccggctttgttgtcttccctgag

SEQ ID NO: 53361 - DNA, 580 bp, Mus musculus
  source 1..580: mol_type = other DNA
caaaacaaaatataaaccatgatattttttgaatttttttccaagttaaaacagtgaaaattatgtttggtcatttaaaataaaatggcagtatttaaagtacaatggaggtcagcctgcgctccaggataggactacatagagaccttgtctctaaataataaataaaatcacaactacttatatgtgtacaataaaagtttagtcgattaatccagactctgcagtcatactttttagttaattccactttagcattgatgtcaattaaaatttgataattatgtttaatgttgttaagctattttaagggataaataacaatatttttacctcataatattggatataattttaaatatttctattatcctacactaaacgaaatgaaaacacattaagccttaaatcagcttccggcttgcggtttcccgccggtggaatgtgtggaaacacagacgccgatcggccatgtgcatcctgtgcccgcaggaagcggggctcacggcccgggctcaggaagcagtgtctgcggcctaacggaactacagattcctaacagaaaggtttctgtccggag

SEQ ID NO: 53362 - DNA, 434 bp, Mus musculus
  source 1..434: mol_type = other DNA
gataattccgttagcactggcttgcagttcccaaactgaactgggagggtgagcccccagtttagcagctacagtagccacttagggactatgatatttggatgctcaatatatactattcaactggagtagattaaataaaaatccagactttaaactgttcgcaatcaacgcacagcttttcaattttctacttaaagattcctcttagagaaagtctcagcctcagaacttcacaaagatggatttctttaggttattttctaaagacagtttaatatatatgaaacctctgcgtcatccttgagagatcacatggtaattgttgctatttcaaggatcaagtgtcatgaacttcggtggggtggcgcgctcgcgtactctcaccaagcgactgaaagataatcacctattccagagacgctagggattag

SEQ ID NO: 53363 - DNA, 543 bp, Mus musculus
  source 1..543: mol_type = other DNA
tgatcattcacattttgctacagataaaagtgaccaaagttggcttctgggaaattaagctcttcttacttgagatcctattccagttttacagcctgtgttttgcaagccttgaatgtaaaaaagaaaaatcactcaaaagtaagggggtttgttctttttatcttataaacagatttttaaaatccttttaggtttattattgcataatttaatgatagagtttacatttttataaaatacaagtcatctattctttaagaagcatgagcaagctccctcttcattttctgttggaaaaccagcgtttatctactgtgtggcacgaagcttagttatctaaaatggaatgaatttaactttaacatttatgttcataatctagattcaaaatcttattgacgtggttgtaatacgaaatacatttccattttgtaaacaaggcatgacccaattacctggtcagggtgagttaaactttaactcccgggaattgtaaaccaaacctattggagtttgatacgatgattagaatataaccaa

SEQ ID NO: 53364 - DNA, 444 bp, Mus musculus
  source 1..444: mol_type = other DNA
acagcattaagctatatcacttaatgatctgcctaagggtgtcttttataattcctggtccttgaatttaccaggagaaaagtcaggtccaagaagaggaaaaatgtctttttgtccttacaaaaggctgttgaaaacttgagacgagactgttcaacatatttgttctataatactgtcatcatggccactattttatggcagtctcttgcaacatagctcagactggtctctaaagcttctccaatataattttaaatgttatattatttatgaatcacattcttgtttaatttggactgtttacattttactaaaaatcgaaataggaatatgttaaatataccagatgaatattctttaataatctggttgcattaaatgacctttagtctaacaggccttctgcaggctcaggagaatgcatgtaagctttctttaatc

SEQ ID NO: 53365 - DNA, 488 bp, Mus musculus
  source 1..488: mol_type = other DNA
caatatctagaatgtttaatttattcatgtttaagtgtatttaattttgtcctaaataaaatcactcctttaagattcttttttttcctagtagtccttttgttttaattatataatatcaagtgcaagaaacttaaactatctgatttaactgtttcagctctaaaagtccatgtacttttagtataaaaaatgtttaattaaaagccagtttattcacttaagattggacccctggtgtatgtatgttaagccaggattcctcacattgagtcagagtcttcctgattgcccaggcaggcctatggctgtctacaactgaggacttccagattcaagactcagcttgtctgagtatctgctctgagggtcagctctcaaggctgctttgaaggaggtctcagagcgccttcaggaaagtttctcaaactttagaactgctcgagttcttaaaatccgccttaaccaacagtgaaggcggtcacgcc

SEQ ID NO: 53366 - DNA, 639 bp, Mus musculus
  source 1..639: mol_type = other DNA
tctgcttatatttatatattcatctatggtaagtgtcatcacacacacacacacacacaggactgtttgagttcgtactggttggaccagtacaacccgaaattttcttaccattcacagcagtagcaaaattacagttacagttatgaaatgattttttagatctccaggggctcattccataattccctgtccttgaggaaatatgaaattatgtattttatatagattataactcatattttatagatttaacttatatatagttcatattttaacatatctaattttcacctaatgtacatcattttcatttaaaatatatcattaatatttattcagtgtacatgatttttattcattgtatataatgtatgcagttataatgtatataaatcacattcagtgtatataatttatatttaccgtatataatctgtatttattttgtataacttctattcaacgtataatttatttttaatgtgaataatttatatacacacatgcatgtgtgaatatggatgtagtaaatatgtatatagttactaaggacacaaataaaacataaactttatagactagacatgtttcaatgttgtatgatatatgttacaggaggcctgctgcctctggagg

SEQ ID NO: 53367 - DNA, 285 bp, Mus musculus
  source 1..285: mol_type = other DNA
ctgcacatatatattatgtattctgaatcccgtattttggaaccatatttgcttgataatgaaatcaattttctgaatttggcttacaaaatttttattaagaaattttgcatcactgagcctgggttgagttttaggacagccagggctactaaaacattgtatcagtattcaagcagtgctgcgcttcgtttttggaatcttgagttttcaaaatactatccagtgagcctttggatttcattgtaatctgtctctctcttaaattaatttggtggtagaggg

SEQ ID NO: 53368 - DNA, 635 bp, Mus musculus
  source 1..635: mol_type = other DNA
tttccacgcgccgagccccgcgccgcggaacgaaaccggggcagggcggcgtgcggactctgcacccgatcccgctctcccgtccgcgtgccaggctcccgggacgagcagcccgcccgaaccggctctccctgctcccgtccagccggcagcccgccgccgctgctccggccgccgccgagctggcgagaagtggaacctcgggctgccgagcatgcccagtccgcggcggagccgggtcggcttcccgcgcgacgccagtccgttcctccgggtgttcccggcggccagggggcggggaccgcggacgctcgaccagggacccagctgagtcccgcaggacagctggccgtggggtgtgaaacgggaactggagatgcggtatcctccgggatcagaagccctcccttatgattgatcatttaaaatggatgaacctcaaactcttcgggacatcaggggtctgcaggcttcctaaatcgcgcagccccaggcagcgtgaaggcccaggagttctcgggaagaaccgggccctcccccctagtccgtccgcctcccgccgcctctcggagctgcggcgaaaacctggagagcgccgcaccagggccggagcactgcgcatgcccaatggcccc

SEQ ID NO: 53369 - DNA, 389 bp, Mus musculus
  source 1..389: mol_type = other DNA
tgtattaggaatactcctaaaactttcatagaaaaatgttttctttttcctaaaaaacatttcaaagccaggcagcagctcgcttgctttgaccttggttacagcaaatgcaaagtaacagccagcggctgtccagtacttacttcaagacagccctcctttttttccctcttaggtgcaaactgatgaaaataaccagctataatctcagccactcccttttgacactcatcattttaaatccgatttttagcttgttaaccaggtttcaggaccgaccccactagtggcgttgggcccagagattccggaggagagcgacggctgtccaaacatctttcgccaccttcatcgccagcgccttaggaacgggaactcctcttcccaac

SEQ ID NO: 53370 - DNA, 409 bp, Mus musculus
  source 1..409: mol_type = other DNA
aggtatttagattcaagatttttgagtccaagattgacagacactcaactgttggggttgactcagtgactgagggactccaacgctttattctagccttcgtgggcacacatgcacattttaaaatctcaactgatttgcatatctaactacatgggactccatacagtgatatatttaattgcataaacaagcttacaatcttgaggtggtgtgtcagctctagcctacattaaaatcatacttaaattgaagcccagggcttaaatttctgaaggaataagcccctgctgcttctcttttggtagaagccgggctacctactagaaaaagacaggacgttccggcgcgacagtcgcccacgctccgggtcaactgacgccggctccacctgcgcccggtgtcacac

SEQ ID NO: 53371 - DNA, 216 bp, Mus musculus
  source 1..216: mol_type = other DNA
ggcaacggcccagccatttgtgggccggaaaggaccagaaaaacttaaggtttcatcattttctggtgctctgaggtccacatcagggccgagggcagaacgtgtgtcagtcaggctcgtcctggacctgagctggcggagcgccggcggggaaccccgccctggcggctgccgggtccccggggctgggcgctgctggcggagccgacggggcgg

SEQ ID NO: 53372 - DNA, 321 bp, Mus musculus
  source 1..321: mol_type = other DNA
taggaaaacaggcatgttcccagcttggctgtagaattctttagccttaaaagataatcctgggaatataaaaaggtcttaagaagtctgtcttattccttcatctgccagacctccctggtctgcctggctgctcacatgcgcgtctgagcagcatcccttctgtaaaaggctccaattcagtttctgagtctctcaagttgaactcagaggtagctcgccccgcactgcgtcgccatgccttggctggcacgccaccggctcggcagggatcgcgcatgctccgtgcggtggggggcggggctccagcccccggaagcg

SEQ ID NO: 53373 - DNA, 475 bp, Mus musculus
  source 1..475: mol_type = other DNA
gacccaccgctgcggggagctgcgggtctcatcaccgggcggtggggagatgtgaatgtacacgccccgtatgcacaatcatcatgcttggctgggagcgttcatctttcgggcaaatgaacccagctgcctgggagcccgatgaggtgacccacgcgggagactgtcgccgacaaatcctagcgaagcactgcaatctgaccacagcgcagggacgcaggaaggataatcctgcccctgaggctcccgtgcgatccacctgtgagcggtcagcgattgtgctcagcgcaccctctctctgcgctgaggccaaagccggcgtagctccgggagcgagccgcggacacactgggcatgctccgcggcgttccccgcccctgccccgtccccggctcagcgtccggctttccgaggcgccctgctctcccggcggggcggcggagggggcgggctggccggcgcacgctgggcgtcg

SEQ ID NO: 53374 - DNA, 613 bp, Mus musculus
  source 1..613: mol_type = other DNA
tgtgaatgtacacgccccgtatgcacaatcatcatgcttggctgggagcgttcatctttcgggcaaatgaacccagctgcctgggagcccgatgaggtgacccacgcgggagactgtcgccgacaaatcctagcgaagcactgcaatctgaccacagcgcagggacgcaggaaggataatcctgcccctgaggctcccgtgcgatccacctgtgagcggtcagcgattgtgctcagcgcaccctctctctgcgctgaggccaaagccggcgtagctccgggagcgagccgcggacacactgggcatgctccgcggcgttccccgcccctgccccgtccccggctcagcgtccggctttccgaggcgccctgctctcccggcggggcggcggagggggcgggctggccggcgcacgctgggcgtcgggacgcggctgcgctcagctctctcctctcggaagctgcagccatgatggaggcccggcgcaggcgagggagatgagagacggcggcggccacggcccagagcccctctcagcgcctgtgagcagccgcgggggcagcgccctcggggagccggccgggcggcggcggcggcagcggcggcgggcctc

SEQ ID NO: 53375 - DNA, 528 bp, Mus musculus
  source 1..528: mol_type = other DNA
ttcgaatcattttgcattctgctaagcttacaagtattcttaggttttcttcaagttcttttcttagattaaaaaaaactgatcaaacaaaaatttgatgacaggaatttttgtcatcagaacacattaagcaaaacttgacttttaactgtttttattattatggtagtgacagattctactttacagaatattccttcattcacatttgtggacatggtaagtgagacaaaattttctggtgaaccaagtacctgtattcttcacaactttggaaaggaggtattattttccacattttgcagtgattaaaaaaaaaaaagtctctgatttcaaaaccctcagtcatcctcaagaggccaactggcggtgacttcctgatttatcctccaggctcaccgggtaaccaagctgcccggtggaggcctgggcagaaagtcgccggggcctcagtcacccctgtgggttctgtctcgcgcagggcaccgccctgcctgacccacgcggggacacagtggtagagtggga

SEQ ID NO: 53376 - DNA, 432 bp, Mus musculus
  source 1..432: mol_type = other DNA
gaatcaaatggatttaacagatatctacagaaattgaccatatatttgaacttcgaatcattttgcattctgctaagcttacaagtattcttaggttttcttcaagttcttttcttagattaaaaaaaactgatcaaacaaaaatttgatgacaggaatttttgtcatcagaacacattaagcaaaacttgacttttaactgtttttattattatggtagtgacagattctactttacagaatattccttcattcacatttgtggacatggtaagtgagacaaaattttctggtgaaccaagtacctgtattcttcacaactttggaaaggaggtattattttccacattttgcagtgattaaaaaaaaaaaagtctctgatttcaaaaccctcagtcatcctcaagaggccaactggcggtgacttcctga

SEQ ID NO: 53377 - DNA, 574 bp, Mus musculus
  source 1..574: mol_type = other DNA
ctttactaaattgaagtcctgatattaagtaattcagtaaaactctggagttattaatttgacttgaaaatgtgtgatttttaaaacattgtagatttaatagcactgtaatcaatgagactgaaaacatttcatgtttattatcagagtatgtgctttgaaaaatatggtagttttaataagaatgacatctttaagatcatatagttgaatgcttaatcactagggagtacaattggcaattggttctaatactttgtgcactttatgacactgagagtcactgcctccagctcttaggacaaagttgatgacagggcaatggtcatggcagattccatttctggacatggtaagtgagacaaaattttctggtgaaccaagtacctgcattcttcacaactttggaaaggaggtattattttccacattttgcgtcaggaaggacacataatttgtagtctctcaggctgtataacaacgacagaaatgtctctctgatttcaacagctgcggctttgctgcacttcagtcatcctcaagaggccaactggcggtgacttcctgatttatc

SEQ ID NO: 53378 - DNA, 581 bp, Mus musculus
  source 1..581: mol_type = other DNA
ggcgaccgctgctgctgctgtggcttaggccgcctccccagccgggtgggcacctgtcctccggtccggaaggtggccggctgtccccggcccacacagggtgctgcctcagcgcctctgtgcttctgcctgttccagaagctgtcaggttctctggcgaccgctgctgctgtggcttaggtcgcctccccagccgggcgggcacctgtcctccggtccggaaggtggccggctgtccccggcccacacagggtgctgcctcagcccctctgtgcttctgcctgttccagaagctgtcaggttctctggttttttaacttcttaggacaaagttgatgacagggcaatggtcatggcagattccatttcacagaaacatggtaagtgagacaaaattttctggtgaaccaagtacctgcattcttcacaactttggaaaggaggtattattttccatttgtagtctctgaggctgtataacaacgacagaaatgtctctctgatttcaaacagctgcggctttgctgcacttcagtcatcctcaagaggccaactggcggtgacttcctgatttatcctcc

SEQ ID NO: 53379 - DNA, 526 bp, Mus musculus
  source 1..526: mol_type = other DNA
attttcttttagtttttatttaagaaaatgagtgaagaaacatagtcaatcagcttactatttgctggtggactgaattcaaatcatcttagaacaataaagcttttcatttccaacttgttctttataatgaagtatcttagcatgtgttaatatataaacacacttagtatttgataattcccaatgttagttactaaaatggattaacttttttccctgacaataattacttcttcactatttctggtatatgtttaagtattgttataaaaatatggatgctaacaataatttacattgttcaaactctaaccaggaaatttcataaagactacatggcatgattcaattggatcaagtcttttactaccacaaccatttaatctaagaccagttactaaatcatttgcattgtaagtcatgctcaagttatattgtttcctaaattacttctaatcaatgatcctttgaacaatgtttgcatttgttaaaggttaaactgaaatatttgatttatatatca

SEQ ID NO: 53380 - DNA, 365 bp, Mus musculus
  source 1..365: mol_type = other DNA
ttttcgaatctctggaaagcaactgagtagttgacagagtttgtaagcagctagcatctaagtcactttgaactctgttaccaatggcaaatgactgagaatatatagatacatagatatagagatatacacacatgtgcacacacacatatttgtaacttttcataatacaaggcctctactgaatatagagatctatacagccctaaaactcctaatgggttctatactggagatcttgaatcatgcgctatagctgggaagcttatcatattaaaagtattataaacagaggttcacatctgagtacttaaggtccagcaagattgttctggcagtatctgaatcgttcggagcagagcatg

SEQ ID NO: 53381 - DNA, 465 bp, Mus musculus
  source 1..465: mol_type = other DNA
ataaaaatttgtcagaagtattggttaatagtccaaagctatgagccattatgttcgaacgtgtaatgagtaagtccttcttgttccaacaagctgagactcactcctaggatttggacaaatatagataatagttccgtttctgaaaggatttcaggagtaaaaaatcagaaatgcctgtgcagctttgcttctgtagatttaccaaaagaacagaaggatgatacctcccttgtgtgccgcccatgtggaatttagagcatctctaccttctttaaggatgaagttaaatggtttctagatccacagtcaaactgattgcagagtttactctaggtcaaagtcctttgacaagtgcagtattttaatatactgttttttgtctaatacgaaccaggctgattcctcccatcaatgacagacaggagctgcaaacataatgattacttggcatcatgtcgacca

SEQ ID NO: 53382 - DNA, 487 bp, Mus musculus
  source 1..487: mol_type = other DNA
aactcaatagcaatcaataatattgtgaatgagtgctcagccaagacctacccagccagcaaggatggggatggctgagtcactcaggaagatacattcccagtagaaaaattatctcgtttttattattattaacttggaagcacagtctttacttaaaataatgaacttctttcttgctgattaacaggaggtcaaagagccacttgcattgcctctgggacatttagttcattaaaacaactaggctatctggtgatttaattactaggtatcacagttaacaattaactattagctacaaaccaaatttaaaatttggtatgtagagaaacaagataaacctagattgctttcttacaattttttttttctaatccagcactaagaatggggaattttcttaaaacttttgacactccacataaaagtaattaacactgaatttgatcttttccacctcttgctatttaatcgaagaaagatg

SEQ ID NO: 53383 - DNA, 544 bp, Mus musculus
  source 1..544: mol_type = other DNA
tatattaagaatcctggtatataccatataatcactatatgtaacatatgtcacatacataccaatgttttcaaaaatgatcaataacaaagggtaaacttttatttcaaaacttctgtaagatcaggctgacctcaaactcatatgcagaaaagtattgttttaatgtacataactgatttttttcctccaggttaaaaaaattaaatagataatcaggttgaaaggtaaatattaaatatggttagaatttttaatttacacttaacgataaagctcaagctcaagtccagttttgtgtgtgtgtgtgtgtggtgtgttaacatacacatatacgcatatacgtatttatacagcgatatatttgattatgcagtctctgtgaattcaaggctagcctagtctatatagcaagttctgatccagagaaaaataaatgtctataaaaacattttactcgatagaatatgttagatctgtatttttatgtagacaaatctgtgtcttaacattagataggctcaaatttgccccctccataaaa

SEQ ID NO: 53384 - DNA, 322 bp, Mus musculus
  source 1..322: mol_type = other DNA
aggagtggcaccacccacaatgtgctggtaccctcccacactaattactaattaagctataaaacttgctcgcagataaataattttacttgtctctgtcttactcatggaaaacatataagatgcagcttttgtatatcatctatggccatattaaagacactgcattataatggtgacactatagtaatggtaaggagctaaccaatctcaaaatgggattcctacataagctgtaatcctatagctaaaccattaggccaagttgataattcactgggctgtccaggtggtccaacctagggccgcacccaggggccgg

SEQ ID NO: 53385 - DNA, 422 bp, Mus musculus
  source 1..422: mol_type = other DNA
ctggagtctgtgacaagacagagccttgtagagaaactgactccttatgggcatccattatcaccatcaagggatggactcttagagattccacaagttctcagaagggcttaacaagggaccctttggctaccattggatacctgttatgtaccagctatctaagatgagaggtcctgggctcatcctagcctaactttttaaaactttatataaaaacataacaactttcattcaagaagttctgctaaaaatagaaaactcacccttttcaaacattgtgataactgtttcaggcaaaagtcatatttagttgctaaaattagctggtagcagaatgtgtgcatactcttaaaacaacgcttactacttcctaaattttcagcaaagataaactgtcacttctgcaatttttttttttt

SEQ ID NO: 53386 - DNA, 466 bp, Mus musculus
  source 1..466: mol_type = other DNA
cctccgatcatgatcataatatgcccatgtgaaggagtaaactactttctcaggtcatgtcagacagctgctgttgctcctgtgtccagcaagatgaacagacaggtaccgtcaggcctggttctactttgcatcttttttacttataaaaaaagtatgagagaggactttttctcagaagaatgacattaaaacatatagaaatgctaattactctcacttgaccattatatataatactttttgaattatcatataatactgaatacatgtgtataattaccacacatcaattaaaataattaaaaaaactattaagttaagtttaatttattaacttacagggccctttaagctaacttaatgagttaatgctggatttcaattcagaaattgcgtaagtacgccgcctccactggcagaggtacatgactcagaaaccggttcccctggctgtaacagtgat

SEQ ID NO: 53387 - DNA, 438 bp, Mus musculus
  source 1..438: mol_type = other DNA
tactctcccacatatatgcaagaaatcaaacactatagtaatatcatggaaataatacagtcctttaacattctgttcaaaaaataggtcaaccaatctgtgaacttcttttgtcttattgaagggattcgtttctaccactgaattataaactcatgtgtgaaaaagtgactattttagctgcagtcaagctaattaattctggtatttaagatatttgaactaaacaatttataccaatggaaattcattacaaagaagaatttgttcattctaaattggcatgtccagtacatacagccaggctgcaggcatgtgacttatttcatgtccacggcaacaattcgtggcaggaagagacagctgggtagcattgtgctctcctgagacggaaatgcagcaactaagaatcccgcatgatacattgccaggtacagt

SEQ ID NO: 53388 - DNA, 412 bp, Mus musculus
  source 1..412: mol_type = other DNA
gtcactgactgtccatcaaagccaacgatctgacacttgaggtcacttgatctcccagtgggctcaacatttcaaatttcttttacaaagttttttttccttaatcatgctgttaagggtcagtaaaaagccagcaacatgcggaatgttaagggttaaagcagttacagtgattctgacttctaagttacaaagacacaatgtataagtacaatgtagcttccataaaaacatgactcctctgcatatttatgggaggctaccttttgcaacagtgttgcttaaagacaggggctggcatcttctgaggaatccgtctcccatgacactagcccagtgtctgggcatgtttatccccataagcagctgagctgcctcctgtttcgggagcagaacggggctatataaccct

SEQ ID NO: 53389 - DNA, 214 bp, Mus musculus
  source 1..214: mol_type = other DNA
taggaagactccatttgggaaacgaagccagggacattccccttgtcacttcatgtatcatatatgagctctgtggagggacctccctcatctccttaattaccattcatggtctttgtctcggaatgcccaaccccgctcaggccgcctgtgcagtggtgagtcagtgggtttccccgggagaccagcagaactttctcccctagagctggtg

SEQ ID NO: 53390 - DNA, 264 bp, Mus musculus
  source 1..264: mol_type = other DNA
gctcagtccctggacgatcagggtttggcccaatcgagtgagcctcagagcaaaggctggcagtgctgccctcttgaccgctgtcttgcatctctgctcttgacaccgcgggctttaaggccaaaaggctgcgagccttacaggactcaatccctgtctgcaacggactcagagataagtctttaaacagtcaaaaacagatattttaaaaccttctgagagcgaagaactcattagttttgggctttaagggccgggccacag

SEQ ID NO: 53391 - DNA, 635 bp, Mus musculus
  source 1..635: mol_type = other DNA
cagtgtttgtactgcatgtaaaaagttttctgctgttatagaaagataacagttaagttatagaaagccaaggcttttaatatttttaaaagtagcattcctttggattccattgtgttacaatgtttgatttttaaaaaagtcataaactgaagtttgacttgagataggacaaaacttgagcaatttttgcaatgtctctaaaaatacttcagacattctgtgctatgtatttttatgttgctggcagcagtattttgtaaaagtaagcacatctgtctcactaatacaccaatttgtttttgtttgcagaaaatggtaaatatacatatatatatacatatatatatacatatatgtgtatgtatatatgtaatactaaaataattgttttaaaatgaatttctttataatttattgttaaaaaatgcttgatttgtatacagggaagctctggctgggcttagagcaggcctgggctgggctgaatcttttgggcgaacagaaggcgcatgctccccgcttccccagggctaggccgatggccaggaggggtggagtcaccagggcacttcccggtggtggaccctgggcagggtgacggctccgccctcccaccaagtaggtgtaggcac

SEQ ID NO: 53392 - DNA, 437 bp, Mus musculus
  source 1..437: mol_type = other DNA
tcctagggacagaagccagtgtcatgggcaagagctctgtcactgagctactttcttttaaaggactttgaatgtcattatctttcattctatccatctatctggatctatatctatctatctatctatctatctatcatccatccatttactttccctgggattaaaatcccatcccagctcagatcctagggcttaaagtcaagtgatataagcccctgaagtcatttgagtctcaatttcaatttaaatccaggaattcaattcaggatcatgttattacagtctgcgaattaaaaaggacagaaaaggatcctgtctggtcttgcattgtgcaaggagaattctatgctagagcgggagcttcctggaagaaatttagcatctacccaaaacaaagctccctgggagctgtagtcgagccaggttgcctgggt

SEQ ID NO: 53393 - DNA, 511 bp, Mus musculus
  source 1..511: mol_type = other DNA
ggagctaattagttcatgttctttttatttttaaaatacaaataaaacttttttcaatataaatatatcatttcattcaaaagtagaaaaaatatactataaaacaaatttgattatttaaagagtcagaaatcaggtcttctctcaacatgtggaaagtcttggttctagaaacaaatcatttcagagatcataatgattcaaattgtctaccttgtgtcctggagtcaatgacactgggataagttgaaatttattcacatagaaacattatataaattactttgtcaggctgcagaaacaacattagattttatagcagtgtgcatcactttaaaagttacaaacttctaataaagtaactcaagtagcgcatcgctctctggagttcacgcagcgctcaccgcaggctctctggcaggggcgcggaccgcgtgagtggaccacgggaagtcatagcgaaggtgcggtacagccagggcaccttatggtgcagcaggtgccacgcgaa

SEQ ID NO: 53394 - DNA, 439 bp, Mus musculus
  source 1..439: mol_type = other DNA
caggggttctggaaacatttccccagacacaggtagtgtgttttactaagccaagcagactgcgctgctgcacatctggacatgcacgtggtgactaataagctgccccacatgtgaatcccaagatctagaacgccttaagggttcagggttatttgcctcagaactgttagtaattatgacaggtcatgagattaatgattctccttactaattatattggttactaagttaaagcataattctgcaggaatctccaccaaagctctggcttggagctctgagtcggatcccgaggatagtcagcctgaccctgaaaggcttggctttttttacccttttgtccataaaaagtgacatcagtgttactttctcttctttggggtcaggtgctgcacagaagcaggaaaaggaaccagctgctcctatatataggtct

SEQ ID NO: 53395 - DNA, 477 bp, Mus musculus
  source 1..477: mol_type = other DNA
aatgagaccaatgaaaattgtatcctttctgtggctttctcctgaggcttccaaagtttaggcttaaggcaaacacggttacctcttatgccattaacaatctcaagttgctatcatgcatgacttcataactcaaagcagaagtctttcacttagtcacataagcgaatccccctggtgttttgctacttgaattcaatgtagaataaaatgaaaacattggtttgattagaactcactatcacttctttcaaaatattttagaatagtttctttcgtgtggccccagaaacctctgcagagtgcactagagactgtggaaaacactcttttcctcccagagggactgtcaggctggaggaaatgcctcgccaccctctgacaccagaggcagagtccagagcttatccaatgctgtggccaggacatagaaggtcagtggtaagtttcactttccagcagagcaccagctgattc

SEQ ID NO: 53396 - DNA, 296 bp, Mus musculus
  source 1..296: mol_type = other DNA
cagttggaatatcttctggatatatgcccaggagaggtattgcgggacctccagtagtactttccagagtgattgttcaagcttgttaaggatgttgaacgttccctatctgatttaggataggtaaagatcctttcccaatctaagccattgctgttctgtacttagatttgaccttagtacaaagagataaggataaaagagcaaacagcactctgtaggtttcattttctgtaagttggaacattgccagtttcagttaggaactgagggtgtagcaaaccttctctatataa

SEQ ID NO: 53397 - DNA, 341 bp, Mus musculus
  source 1..341: mol_type = other DNA
acaaatgggacctttgttgttttgaaaccaacataccaaatacatactgctatatgtgatcttaaaaaataatatggcatgttctatgaatatatatatcaacaatctcattaggttcctaaggcaagcatgtctttgttgctgggatttcaaaccataaagccatataaaaactctcaatacattaattataattatatctatatgtctagatttggcagatcaaacattattctaggttattccccaacccagccatttttgcctagttaaaatgggaagaagtaaaagagcaaacactctgtagttttttcagttaggaactgagggtgtagcaaacc

SEQ ID NO: 53398 - DNA, 489 bp, Mus musculus
  source 1..489: mol_type = other DNA
agaaaatgagatcaatgaaagttgtatcctttctgtggctttgctgaggcttccaaagtttaggcttaaggcaaacacggttacctcttatgccattaacaatctcaagttgctagctgactaggttatcatgcttagcaaatgagtcatgcatgacttcataactcaaagcagaagtctttcacttagtcacataagcgaatccccctggtgttttgctacttgaattcagtgtagcataaaatgaaaacattggtttgattagaacacactatcacttctttcaaaatattttagaatagtttctttcgtgtggccccagaaacctctgcagagtgcactagagactgtggaaaacactcttttcctcccagagggactgtcaggctggaggaaatgcctctcgaccctctgacaccagaggcagagtccagagcttatccaatgctgtggccaggacatagaaggtcagtggtaagtttcactttc

SEQ ID NO: 53399 - DNA, 382 bp, Mus musculus
  source 1..382: mol_type = other DNA
gaaaaattaccttatcttaaaccatatatactgaataattttgcttaatatagaaaacatattcagtagattgtagataaatatttggatcagttaaaatattccagttaatttgatgagttacattttcttttaaattactggggtctctcctacttagactcgacttttataatagactcattttcctgataagtaaccaatccctttcataactcataatccattaattcacaaatggatgaaaccattcatgagggtctatataaaggctgtacaggatcaagaataataatcctctctcgaatatcaccggtatactggtacacctgcgtagctttaggaactgagggtgtggcaaactggtaatccttcatatata

SEQ ID NO: 53400 - DNA, 369 bp, Mus musculus
  source 1..369: mol_type = other DNA
gtatgaacacactgtagttgtcttcagacacaccagaagatctagaagagcagtgagtgctcttaaccactagtagccttgctattagtgggatagcatcaaggctctgaataacatcaccctttaggtcttgttaacatgactaggtggaaagaaccctttagagtcacctcaggagttataaagactgtattcctaaaagaccccctagtgccacatgggaaagtctcacttccaaggaggaactgcagaccttcagttgcttggaagaaagtgcttcatccgacatgtctgtatccgtttcagagccttcttcagtggagaatgcagtagggcaaaccccacagtgccccacagtgcgtctccctg

SEQ ID NO: 53401 - DNA, 269 bp, Mus musculus
  source 1..269: mol_type = other DNA
gagtgacatggctttatataacatatattcatatatatttattcatatatatttagtttcttggccaaaaggttttaatacctcttgtcagagagaatagaattgacacatttaggtgttgccctggctatttgtttagccagcattctaaggactatgtcctcagaagatcagaaggagcatactctaacctgctgctcacttttggagcaccaagtgggcactggtggctgttgggttttcagcagagcagaactcctcagaaacct

SEQ ID NO: 53402 - DNA, 518 bp, Mus musculus
  source 1..518: mol_type = other DNA
taaagactgtcttatagagactaattggcactgtgttgggttgtgttttaagcacatcactcccaggtaatgaagtattgaccaacactaaatcaactcattgggctaacagttttatttggagatataaactggttgttgcttgaagcatagacattgctatggatttgctacaattttttttgctatataatttggctataatatattgctataagtttaaacattccctgaactaatttcatgttagtattaaatgaaaagtactattaccatgaataagttgattcataagttattataatgttctacctgagaaaatttacttataaagagaaaagtttattttggtttacacgttttggagattgtagtccaaaatggagtgctccttaagacacatctctagtaacctaaagatatggaaccttctattagtagttagagatcacacctctaactcatagacctttgtaggtctgatcaaaaatgagaaacacatttgtgaattgaaaatt

SEQ ID NO: 53403 - DNA, 441 bp, Mus musculus
  source 1..441: mol_type = other DNA
ttgttgaaaagaatagaggttggcatttctctcctggagggcggggcaaacaccatttacccccccccccccaacacactgttaatgagcctgttaatgaacctgttaatgaacccattttctctcagcaagagagagaagcaaatgttcttttattttatagagaaactgagactcagagttatcaaaggcttgaactcaagtcggtctgaccagggtcccggtccttgcaagatgcacgtgcaggagacttcttaggtccgcagtccccagtgagctggctcacgactcgcgggccctcacgtggtcaagcccccagcgcagagcggaccgagcccgtccgccggcagggcagagtcaccctcggggctgcggtgactgctagtgacagtgtccggcgggcgctgcctgcgggccccggcccctacggcgcctccgccc

SEQ ID NO: 53404 - DNA, 637 bp, Mus musculus
  source 1..637: mol_type = other DNA
cgaggctgccagagccggagcccgcgcaccgctccgccggtcccgggcatgggcgaccgcggcgcgcaacacgagcgcgcggccctgcagtccccgggggcccccgagggcgccgcggccgccgtgaacgggctgctgcacaacggcttccacccgtcggccgccagcagccgcgacccgccggccccacgcttccagctcccgtccgagctgcagccgcagccgctgttcgcccagcatgattctccggccaagaacccgcgtaagtcctgccggcagggaagcgccggtgcccgcggtcgaggggggcgacagagtgccgctctggactgcgtcctccctagaggcgtcgggcgtccaaggtggcggcccgcggtggcgcctgtctagtccgatccgcctactgggtcggtcagacactagctggagctgctccctcggtcaccgtagcggctgggagaacgcactgcccgagggcgggctggcacagcccggggctcactgctcccggagtttgacaagtgtttccacgtgagacggctggtgtagccgttccaatggattgcaggtggattccccccctccccttggagtgggtcgagttgagtgtttgtaattgtacaactccaaaaagtgc

SEQ ID NO: 53405 - DNA, 237 bp, Mus musculus
  source 1..237: mol_type = other DNA
ttgggaagggctctgccagaagaaattctcacctctttaatacagatgttttcagagggaacaacgttatgttctctctattccttcgtagggacagaatcccatgataagaaggactttaatgtctacattagactcttgtatattaggtacttttgtgacacacaagagtcccctttggcactgcaaactttttatttcataaataacagaacagggcattgtcccctctcgaga

SEQ ID NO: 53406 - DNA, 495 bp, Mus musculus
  source 1..495: mol_type = other DNA
tggttgttaaccaccatgtcctctggaagaggtcagtgttcttaaccactgcccattacttatttagaatgtattaaatgggacggtagcaatacctactttaaagggttcttagcaccagtcagacaatccattttatgcataaggtaaatgctcaatttacgttagcattatttttattcaaagtgaaagtctatgaatgtattagtaaattagcacagtgccttgatttatgctttcagaaacatcaatatgctcctaaaatgtattttgaggaaaacgtgtttcatccaagagacttggtcccaggtcgcaagtcctttctgccccggggaatgattcctccgctcctcatcgcgggaggcagtgcggcctcagtcggtcgcccgcccgccccccagacttgaaagccttttccggaggcgggggcgaaactcggccgcgagcgggtccagcccccagggctcgccggaagccccgcccactcccagggtt

SEQ ID NO: 53407 - DNA, 576 bp, Mus musculus
  source 1..576: mol_type = other DNA
aaaatgatagtaacatgaataattccttaagttcttgcatttttccggtagtgtaaaaggagctttgttaatccaaaaaagttgcctttgtcctattcttttataggcacagaagaaaatattggtattttgcctagaacactgaatgtattgtttgatagtcttcaggaaagactatatacgatagagaatacttaaaattatcatctgatcatgctgcgacaaattaaggaggtacgccagtattttagtacataaaatatcaaattcatgacattttttgtatactatcaggataattttagcttgtattataatctggttttggtcatagtgtttttcaaaaccaaaattatgtaacaatactaagtagaaatgcaaatgatactagtcttttttgatatagaattagtattatactttgaaaatatgaaatattcatttgaaaataatacaaagaaaaaaattggctccctagttagcttagctgacctcagcttgtctctgaatggatgcacacatatgcagcacggacgacttggaaagttggtcctttgttggttggggaccaaacca

SEQ ID NO: 53408 - DNA, 298 bp, Mus musculus
  source 1..298: mol_type = other DNA
ggccatctttactgttggtgctgccaatccatgagcatgggcgtctttcttgatagacttgaagttattgtcataaagattagagttaccccaagatattttatattattgtggctattgtgaacctttgtataaaggaaggctactatccagccactttgctgaagttgtttactagctggagaacttctcttatttagctaacactttgagtactatattgaataattaatttgaatctccaatacctttaagctgtcctggaaatcactttgtagaccaggctggcctctcattt

SEQ ID NO: 53409 - DNA, 587 bp, Mus musculus
  source 1..587: mol_type = other DNA
cctgagccaaattctcagggcttgagctttgagctggattcctggtatctgagacttttagacctcactgagctgtatccttaggttatagtcagcattgtaagtgaatacaactaacaattactctccttaatggttcattttggattgttctgattagtgtattaagcaatttaaaattaaagtttgtgaggaaaattgcaaagtttctctcttccaagaattaactatatattatgtattttatggcttttatagaaaagcctttaaactttgctaataaattataccatctgatataagccttgaatcaggtaagatttctattgcaatgctgcttccgaattaaatttctttttaaaggttacccattcagtaagtgatatgtagctcgaactatttattttactgagaattaatatacatgtgaatatttggacttatagccagcaaaatgtatatggctatattataatcattcaatttcatatttaacctatttattcagtactatcttttcatcctgacaagctgaaaggactgaaaataatgaatgtttagtagttcattattattcttaaggatag

SEQ ID NO: 53410 - DNA, 546 bp, Mus musculus
  source 1..546: mol_type = other DNA
ctaatatagcttagaaagatttttacagtatgagaaaaaattcctaatcttgaaattcagttagtaagatttattccataattagtcaatattttcacatctgccactatgattaaatatttattttgtaagataagtcttcattatatagtttaggccaacctcaagttttggcacgcgcgggtgcgcatgtgcaggctgacctcttaagtgctgggattaaagttatgtaccttcatacttggcttcacaatgggttttttaaagtaaaaataaaactcatgagttttcagtctcacatatattgtgaaatcagctgtatgaataaattaaatttgttatacagaggaaacatttaatcttctgtgatatatacctaatagaagttatctgcttgttaaaggacatgaaaactacctagattctgggttcttcaaataaatatacctgaactagagttggctaatatatagggatattgctaagtggcagtgtactttcctaagatgcacgaaaatatgtttgggttcaagcatttaacaatga

SEQ ID NO: 53411 - DNA, 277 bp, Mus musculus
  source 1..277: mol_type = other DNA
cattttaatatcttagcgatgacaagccagaaacaagtatttttgcctctcttgtttcctgctctatcattagcccatgagtctccagcctcagacagcttttcccacagcattgggaaactttactgaacagacaccatagagtcaaagtgcattactgaatgctggcatgtcacagggccattttagctgcagagccaactggagtgctgataagtccagttatgcctctgaattggccactccaggctggaagattatctcacccagccacggg

SEQ ID NO: 53412 - DNA, 466 bp, Mus musculus
  source 1..466: mol_type = other DNA
agtcctattgagttgcacgaggctggagctgcttattagtaatgcgggactggccctctacatcaagtagattaaaaatcgtgttctatgttgttgaataattgatctgtcaatattaaagagttcatttttaaaagggtcatttaaaagtagaaacatcaaatgatatgtgtatgtttctcatgaaaaacattgtaagacatgttttcgatgtgttggcgctaaaccatcagctttgagagcttagcccaaagagtttagataatcttagccaaaaggccactttcaaagaatgaataggaaagaaaaataacttcccatgtatcttcatttatttgttagttagaattggcctcaaactcagagttctctcgggattaaaggcgtgtatcaccacgcttaaacaggcttcaagaccttagaaatgtctgcatattatgaataagtaagttggctgacggcggct

SEQ ID NO: 53413 - DNA, 457 bp, Mus musculus
  source 1..457: mol_type = other DNA
cacagtgaattataaatagacaatattacagtggctctctgttgtcagtttgtttataaatacagaacagacccatcaagatctgagcagctgtcatcctctgacctcagaagaaccagcagaaatgtgccgataaatctggaggcaatgttcttttatcatttaggatttttattttaaatgtattgaaagagcattgttaaacagataagaattcaattatttttttcttatcagacagtaccttcctggattaaaaatgaccttacatttcagtgctaaacaatggtatgatcttttataaaactaaaaatatgacagtaatgcaatttctgggatgcagctggcagctggcttgctggaagtgtgtcagagcctggagcctccatggccggccccgtgaccaccaggctggctggactcccagagagtcacatgggagaccgcatggaagagc

SEQ ID NO: 53414 - DNA, 394 bp, Mus musculus
  source 1..394: mol_type = other DNA
tgctctctggcagagtaaatattgggtgggtatctaatcaacccctggagggtgggctgctccaagctccaggagcctggcccaggcaccgcggtgggctgtgacccgcaggcgctccaggagctacgcagcagcggcggcggctgctccagaaggcctggcgggcggcggcgagaggctgtgccccaggtgcgggctgtgccccgagccgggcccttggcgcgctcgccccgcgcccatcgccgtcgcctccgccgccaccgtcacggtcaccgcgggctccgctgccgtcgcccgccctcccgcggccgggccacccggaccccccgcccgcgcggctcgcgcctcgccaccgggtcctgctccgccccgcccgcgcgggctgctcacctac

SEQ ID NO: 53415 - DNA, 683 bp, Mus musculus
  source 1..683: mol_type = other DNA
gaccccggaggatcttccgctgggcccggggcgtgatccccgcgggcgccgtgagagctcggcaggcagtaggggtcgcgcgcagccgggggtcccaagttgcccacgccggggcacgggtgctggcggcgcggctgggccgggcgggctacgggagggtccccgggaactttctcctcccccgaggcacgcttgccagcgcggctcgcggccccggccccgcggcgaaggctcccgggctggagagcggcttcctgaaggggaccggccaggatcgagcgcctttgcgaggggacgcgcggggcgggcgctcggggcctttacccccctctcctggaagctgcgtggggagcccctcgggctccgggagtgagcacctctgccgggcggccctggcagcgcgcgccccgcttcgagcgcggcggcgaggacggtggggacccacctgtgcgccaccgcacgcctcgggggtcgcgtcggagccaaccttgctctccgcgcccctgcctgccccgggacgctcgctccctgccaaacatttgtttaatattaaggagtcattccggagcggtgaatgaatcatcgccccggtggaccgcgctccgatgattcacgcgggctccacacgcgcgcgcgtactcgctgtgggccgcccttctgcgagggctgacgcccggaggggc

SEQ ID NO: 53416 - DNA, 458 bp, Mus musculus
  source 1..458: mol_type = other DNA
ctagtataggtcacctttcaaggaatcctccttttactagaaagagcactggggtttttgtttgttttgaaccttgcaaacagcaataaatttttaccactttacctgattgctagacctatcatactgctaagttatatttatttatatgaatgttatagaggtcagagaacagcttgcaggggtcgttctgtccattctctccttccgttgaatgctgaggactgagcaagtctcctcaggcgctgagccaaggagaaaattcagtgaggtgactcagtgctcaacgctgaccattctggtcattgttaagactgaaaacggcactcagggtgtcccaggcgcctaggaggagcacgagccggcgggcgtgggctgggggcgtggccggcggtggcctgcgggcaggcgggcggctggagctgcccttggaggcggcaccggcctggccccgaggc

SEQ ID NO: 53417 - DNA, 551 bp, Mus musculus
  source 1..551: mol_type = other DNA
attttaacatgacgatttaaagtaattttttaaacgttcttacccagaatttattatctgtccatctgtaacttataaacgggcctggccgtcctgcctgggaggggagcacggtgtcgcattgtcctctcccgaccctaagcgcttctcccgtaggatgaggctctccccggcgctggaggcactggaggaaagatcagggggcagacatgaccccgagtccgccggctcacctgccactccaggtgaagggaaagccagggttagaatccgtgtcacagcctttacaaggcctgtccaggcgccccccagctcccgccccgcgccgtctcctcagcggtccccgcgcgtgacgcggggccgcggtctgagccccggccggcggacccgcgggagcggagcgcggccgagggcgcgagccgggcgcacgcagggggtgggcggcggagcctggcggccagcccgggggcgcgcgcacacgcgcgggcgcgcgacgggccgcgggcgcgcgcgggggcgggggcggcgcggcggcggcggttggaaggagc

SEQ ID NO: 53418 - DNA, 323 bp, Mus musculus
  source 1..323: mol_type = other DNA
aatttatagaattccagagaactccatttttggctttcttcccaagaaggaaaagtactactccagggatagacagtaagtattcttcacaatagcattggatgaggtgagaaacaatctctacctcctccatttagctgctcaactccagctgagttgctagggatgctttgggtgagcagtgcccaccatgcttagccctcccttggcaggattgtgcctgaagagttatcagagtcttgagtcccagagacttggctgggagctgccggtatgtgaagctgcccatcaaatgggttgcctggaagtccagtctagaaact

SEQ ID NO: 53419 - DNA, 405 bp, Mus musculus
  source 1..405: mol_type = other DNA
tgaagacagctacagtgtacttatatataataataaataaaccttaaaaacccagcactcgggaggcagaggcaggcggatttctgagttcgaggccagcctgaattacaccacttgaatttgtattacttttctaccacaaagcaaatcattccttttaggacctttgagttctgaaaaaatatttagaactaatctatcatttgaaaaaaaacctgcaaatagcatctggttctgaatattattgtttcatttcatctttcttaactatatatagaccagataaatatgtacaagtttcaaaaggaaagaaagttttgttaacatttgtcttattttcagcggtgagagcaaaatacagcattttatatttgggcatgaagggggaggccccttctgtcccat

SEQ ID NO: 53420 - DNA, 318 bp, Mus musculus
  source 1..318: mol_type = other DNA
ccttgttgttgttgtttttttttttttaataaaacacaataaacacgaaaatgaattgtgcacttgtattctttgatttatgtatagatcctcgtcagcgctgagctaataatttactatgggaagcgggattcatttctgagaaaacgcttattttttcccaagattcgtcttcctcgtctcgagaagtgtaggctttaataaaagaaaagcagacctcgtttttagcactgtaaagatggcggtgggccgaagccccttctctttccccgcgcggccccgcttgcccaaactggcccggccggagagcagccactg

SEQ ID NO: 53421 - DNA, 418 bp, Mus musculus
  source 1..418: mol_type = other DNA
ctttttagtttttaaaagtccaattagtagacgtttctttaaaaaatatttattttagttttgctttgtgttggttatgtgcacagaagaaaagaaagaatctctctcccaagcagagaatatagtctccatttgcttattcagaggcagagtctcgctaggctgtacagactggccctctctgcctctgtcttcagagggaaacacactctctttgcttgggccaaggtgcttggacacaaagttctgagctcagattcaactctgcacacaagctgcagaaggccagctgcgagccgtgagctacgtgctgcacgccaggctccgggaacacggctggatcccgctggcccagggctcagggactctacggtgatcacgttccaggggcaggggctcgtgccccagctgcacactg

SEQ ID NO: 53422 - DNA, 278 bp, Mus musculus
  source 1..278: mol_type = other DNA
ataacttctaaataggtaacaagaactagagaaatactagtttgactactggcattatcaccatttatgcagaacttaatggtaaatatcttggccggagattgactttgaatggaagatcaactcccattaatcttaaagactgggagccgggctcccgatccacgtcccactgccgcggggcgctgctacattccgctcgccggcagggagtggggaacgtcacttccggcgtgcagacgctaagtccggcgtgccggcgtctgcgtcagcagaga

SEQ ID NO: 53423 - DNA, 295 bp, Mus musculus
  source 1..295: mol_type = other DNA
agaagcaaacacttctaaacgtttcagtaggtttttaggtttcttatataccaggctggactcgaactggctaaatagttaagcctgacctcatttttctaaaaactgaggtttcttttatattaaaacgtctcctttgtctctcgaggttcgcaagtctttttaaccgaaccagaatcagtttcttgtctttctgtcttataagcacatctaagacgctctcacagtatttttagagaccttgctggatttgcattgcaattggctagtggcggtggcactggattttcgcaag

SEQ ID NO: 53424 - DNA, 556 bp, Mus musculus
  source 1..556: mol_type = other DNA
caggctttaaaagaaggaatgcctatccttgcattgtgaatactatgggttaacattcccggcctccgggccgtggaactctcggcggacgccaggatccccgctctcggggcctcgaggccagcatgggcaggcccaggacgaaggccggcagttcccggccccagcatctgttgaagggcttggtccggcatcttccgcggagccggcgagctcggccctcgcccgcagccccgctcagggccaggccccgggacaatagcactgagaggcggcggagtaggcctcagtcccgcggcggccgcggacccgccacacagcctcccggcgtggctcccagaggcccgcggtggcgctgcgcggccggcgggcgaccgcagagggcggcgggcctggggccgggaggcggcggtcgcggcccgggttcctgccggtccgcccagggttccggtccatggaccgccggggcgccgagctgctgccggcggaggagctacctctgtgaggtaagagtcgccgcctccgtgcgcgccggggtcacgacgcaggggcggct

SEQ ID NO: 53425 - DNA, 467 bp, Mus musculus
  source 1..467: mol_type = other DNA
cgttttgtagaagtttaaaaaaaaatcccttccggcgtcagagaagacagaggcgtgatttgtcacttcttccctcagctgagcaagcaagggctgtttattcagcatggaggctgcccgcaagccctcgaaggctcctggacaggcagtgaggcgccggtgcgaacagtcgggttacccagggctctgacgcggccgaggctgacccgagcgcccggcctcgcgccgccgcggcccggcgtacttgacccggcccagcctggctctgtcccacctgagcgcgagagctgagggggcggagcgccacatgctgccgcttcccggacatttttttttccccctggaggaaggaaacgggagggcgccggcccggcggcggcgggcacggcggcgggggtcccggcgggctgtgcagcctctagcggggacggctgctccgagccgcccctgcgtcgtgaccccggcgc

SEQ ID NO: 53426 - DNA, 318 bp, Mus musculus
  source 1..318: mol_type = other DNA
cgaagttgcatctgcaacccaggtggaggttccagatgtgttgccagagcaagggctctgggtccaccatttggtgcaagaatgttgggtaatgatttaccatccctgaccagtctccaggagaataaaaagtatacttgttttaaattctgaagaaaagcacaaactgtgtaatttctaaacatgcctcagtttattggatattaatatccctaaagttgacagcgattttattgctcctacatttttgactttgacaagttaaaaatactaataagtgtctgagaaagaaagtgaggtagcacttgctctccgtct

SEQ ID NO: 53427 - DNA, 572 bp, Mus musculus
  source 1..572: mol_type = other DNA
atcccttccggcgtcagagaagacagaggcgtgatttgtcacttcttccctcagctgagcaagcaagggctgtttattcagcatggaggctgcccgcaagccctcgaaggctcctggacaggcagtgaggcgccggtgcgaacagtcgggttacccagggctctgacgcggccgaggctgacccgagcgcccggcctcgcgccgccgcggcccggcgtacttgacccggcccagcctggctctgtcccacctgagcgcgagagctgagggggcggagcgccacatgctgccgcttcccggacatttttttttccccctggaggaaggaaacgggagggcgccggcccggcggcggcgggcacggcggcgggggtcccggcgggctgtgcagcctctagcggggacggctgctccgagccgcccctgcgtcgtgaccccggcgcgcacggaggcggcgactcttacctcacagaggtagctcctccgccggcagcagctcggcgccccggcggtccatggaccggaaccctgggcggaccggcaggaacccgggccgcgaccgccgcctcccg

SEQ ID NO: 53428 - DNA, 277 bp, Mus musculus
  source 1..277: mol_type = other DNA
ttgattcagggacgagattcaaagtcttggttcaatatgttcactgtgcaaccagccctggccgtcctggcctcgctttatagatcaggctggtctggaactcggagagctcctctgccactcctgcctccgagtagtttaccagtccctcgctaagttacatcggagagacccgatgaggcggaggactcggcttttctgttggcgatgtaggcgtcccaggccccagaagccacgccccgtcgtcaccacagtgacgacacggcgtcccatgatt

SEQ ID NO: 53429 - DNA, 531 bp, Mus musculus
  source 1..531: mol_type = other DNA
ttgaaaaaaaaaagccagggagtttttctactaatagaagtcagaggcgagccgcacagagctgaggccacactgagcagcggtccttcagggcctggggacagaggtccaggagcacctctgagtacccgtctgggactaggacgcagccaacggcttgggtcttctccttggagcgccgagctgcggaggtcccccgttccagccttctggccgcccgaaggtgccatcctgccggcggcctcctggcccgcagagtcctggcgccatcccgtcaggatccgcgccccgcggcgcacgtcttgtgacctcctcttcgacggtcgcagtcgctcgctaggtgcctggaacctctgggggcgcctgcggcgcaggaacaccctggcggagggtccccggagccccacagcccgtgcgtctcgggggcgggagctgggccggtccagcgccattggccgcagggcctggcggcaggaaggggaccgagcgcggccccaccccgcggctgcccgagccctggagcgaaatgta

SEQ ID NO: 53430 - DNA, 439 bp, Mus musculus
  source 1..439: mol_type = other DNA
tgcagctggctcgtgcaaagcctgcctgactcacagggaagctcagagctcctgaacttagggagagcagaaaattagttgtccctctggctcctagatacaggttgttaagcaaggctaccactccctgggagcgcttggattcaagagctttagaatttttgtttgttcttaaaataaatctcaacgacacactcagttttttgctagtagcttctatcactaagtgtgaccgagggtcaccctgcagtgcacaacagcacacactgatggaggtggtggttcccctcccctcccggcctacctccccaggggcgggctccacccgggcgggccccacccactgcgccccacccctccaggccccgcccctccccgccccgcagcgccgcgccgcgcttgcgccacctgccgctcgctcctgtggtccgcgcgccgc

SEQ ID NO: 53431 - DNA, 478 bp, Mus musculus
  source 1..478: mol_type = other DNA
ggaaaggggggtttcctccctgtctgggggccctcttcccggccgcttggtgaggttgcaagccccagggctaattgggccggccctccttaggtgcaaggctgcacctgggggtcccagagaccgctcgcctgtggggccctggaaagctagcgtccgctaggaccctcgccctgggatcttcttgggatcctcccagattactcaaccggtgggtcaagtccattgaacgatgattcttgaacgcgctttccaagccaatggaaaagagcccagcagctggttcgacccggctcgagagtctgcacacctaggacaaggaaagaggtgttcctagtcccgcacccccaggaggcgcgctcagagggaagccgccagtgcgccgcctctgcctcggcgcggaacaaacggttaaagatttttttggaatttgtctgaccaaggtaacgtgggcagtaacctgggcggccttataggc

SEQ ID NO: 53432 - DNA, 240 bp, Mus musculus
  source 1..240: mol_type = other DNA
caataatctgaattactgacttgcattaacagactataaaaatcacaaaattatagcagatgtgtgtgatttttacaacacattttatagatatttttacaaataaagacatggacccaggatccttcttccgaaggattcctatggcaaatccattgggaaagaacacccccccaccgcggtgggagaagccctccccctgcccgaggaagccctcccccagctgggagacatcctcct

SEQ ID NO: 53433 - DNA, 311 bp, Mus musculus
  source 1..311: mol_type = other DNA
tttaccaaaaacaatgctttttgaattccctaaacacaattctgtatataactccttactttgtataaggatttgagaaactcactgagattgagtttagtctgacgtcagaagcaaaaaagagattctatgtttctgtagccagcaataatctgaattactgacttgcattaacagactataaaaatcacaaaattatagcagatgtgtgtgatttttacaacacattttatagatatttttacaaataaagacatggacccaggatccttcttccgaaggattcctatggcaaatccattgggaaagaa

SEQ ID NO: 53434 - DNA, 165 bp, Mus musculus
  source 1..165: mol_type = other DNA
tggtatgcctaggctaagtctaagaacgacacgccataagcaattgtttgcttcaagttctcaagacgctaatcaagaccctgaatctcggttttcaaactgggagtttgcaggcccagattgaactggcggccggcacggacgggttccgcgggattcaaactc

SEQ ID NO: 53435 - DNA, 379 bp, Mus musculus
  source 1..379: mol_type = other DNA
agaagtggtctttagatctcagtagttatctcattttctagaaaaggaaaccttcaggtttcttctctaacagaatcagaagaagtgctctcaccctgggagcctgaggcactttcaaagcaaagtaattcttcctattttgcccattacaagttgttttgggtagagcagtctgaacatcagggttatcagtaatctagtgcccaagggtctgaggtctctgccttggtggccaccttcccacccacggtgttcaggccagtgttgccaggcacttcctcgttccggtgcgccctggacgcagctcctacgcccagagcctgggcaactcgggcgggagggtgacagaggggaggtgtcgcaacctcctccctccctc

SEQ ID NO: 53436 - DNA, 299 bp, Mus musculus
  source 1..299: mol_type = other DNA
ttaataaaagatttaaaatgaacgtgtattaagattcagagttcttcctcccagtggagcttaaaataatttaattctggctgcctgaggtattatgagcactgttttcgtactaagttactagagagaggaccgcggtttttctctatagcaatatacattgccacattgtactacatattggattccctaccaaagcagggagcctctgcttcctcgctgcagcacagagtcggcgcgccgggcggtgtcttatcgatgtgacacgcctctgagccgggccggaagcggttcccagc

SEQ ID NO: 53437 - DNA, 532 bp, Mus musculus
  source 1..532: mol_type = other DNA
aaatttaccgagctaacagagctgaggtagctacttgtctcagtttgcagggctttcctggaactcgctctgtagaccaggctggccttgaagtcttttaaagagcctccttttcaattttatgtttcaatctttatgtttacaccttaaattcttggacaggtcgaagtgtgtttaaaaactcatcacagaggaacagacactcagtcccttttaatttaatttaatttaatttaattcatgtatttatttagggaggtctcactatacagccttaacccacatgcctctgtccctaactgctgggagtaagggcgtgggctctccctgtctgtgcaaagacagaggaggaccagtgtgctgtctagcccgactgccctggggtgggggtgggggacagtcaccgcgccagctgtagccaccgcagccggagagcacgagcgagcgcaggcggcgggctccccggggcgggagggcagcggaggacaagcgcgcggagccgggcgcacgcgcacgcgcacacgcaccggct

SEQ ID NO: 53438 - DNA, 379 bp, Mus musculus
  source 1..379: mol_type = other DNA
aaaaaaaaaatcaacccttcaacagctttttttggatggcttagaaataaaaatgcatggtaaacacttggcaattatgttttaatttagtccttctaaagccctttctcagctcctcagtaggggcctggacgctaatgttccaggcggccacgtaggcctccagccagggcaacaggacctggaggccacccaagactgcagctggctgccgctgggtccccgggccagctcttggccccgatggatcctctgggctggagagtgctccaccgagaccaccctgagcggagctcggagcataggcgacgtggggacggaggggccccgcgtccccgcggtctttcaccccgcgcggttacgaaagcgcggaaggacc

SEQ ID NO: 53439 - DNA, 404 bp, Mus musculus
  source 1..404: mol_type = other DNA
atatgccaataagagcctaggagaccatctgtcccgtctccaggatagctcccttgtctgtaaaaatccgctctttccagatgacctgggatctccaagacccagtttcaaagccccaggaagctggagttggctgcctcctgctggcagggagtacgttccagccttttagaaggcttaccattctgtcgcctccctgtcgtggagggatatgaaaatcaataatttgtaatagttgataagtgtcagagaagtattcagtcacactgtattcccctgaaattgacagtctcggtggcatcaaccaggacataatgccgtcctatttttggtaacaattaaagggcctcccggtgaaagcagaaagctgtttcgaagactggtcagtgttttctgtgaagtga

SEQ ID NO: 53440 - DNA, 339 bp, Mus musculus
  source 1..339: mol_type = other DNA
cttgctatgtttgaagttttattcaaacaggtaaaagattcatcaaacattaaagcgtcattaaacaaaacttagtagctctgtgtactctggcagcccctgagatggcaggaatcctagttagggcagaaagcacaatctgtggtcactctgcacttagactgcaggtaatattttgcatttttttcgtgttgcatggaaactaaaaccctaagcgcttccacaggagcaatttaaagggcctgtctgtgctcttgtataaccagtggacagcagcagttgagttattcttctgcagtagatttgaggattttgtgatttaaagaactccttaatcca

SEQ ID NO: 53441 - DNA, 536 bp, Mus musculus
  source 1..536: mol_type = other DNA
tctttttttttttaaaaaacctttaatagcctcaagttcatctttgtgattaacttgttttattctgttttttaatttaggaaaaggtctttagtacttaaaaatcttcctggaagagttaacgattcagtcagatagtatctttaccaaaaaggtaacagaatcctaattctgcaagtctcaccaatatagtactttatcatataatggttaaaccaaacgattccacagtaaaaccatagactttttctctagacagggactacactgggtagactaggctctgtagaccgggcctgctccaccacgcctaaacttaagtgtggactttcggttggtggaaggtgatctttcatcattcccccccctcgtcttttgtcttctccaggactgaaaaggaatccgggcgggaacctgcttgagtcctcagcgattctcacaagggtcagtccgtgagagactgagcccgggaccagagccaccagggggcgcacgcaccgccgcccgaagaggaagtcccgcctcccgtttccggc

SEQ ID NO: 53442 - DNA, 295 bp, Mus musculus
  source 1..295: mol_type = other DNA
acaaatgcagacttttcttctccgtgcgtaaagcattgcagcggtctatttgttttctgaaaaaaaaaaaatttttttttttttttaaagattcatgtactccagggctccagggtgtctgtaaaccaaggatcactgaaggacacaaaccactcctcagagttatttggaaaggaagtttacgaaaacgcctggagctagctacaccccctttgcctgggtccaggtaaaggctcccgaggtctgcagcgggcggggagcccgaagtctcgcgagaccaccgggttttcccgcg

SEQ ID NO: 53443 - DNA, 297 bp, Mus musculus
  source 1..297: mol_type = other DNA
acattaaatacattttatttccactaaacggtcattatatcttaatccattaccacaggttgctgcagttattttttttaatatttatttattatatgtaagtacactgtagctgtcttcagacactctagaaaaaagtgttataacgaagccctgaacggttccaggagttcttcactgctgttagagaacctcccttaggctaagcactgtacccgggtggaggatctcagattgtcctccgttcggggacgcgccgggtcgcgggcaggcccggccccgctggtgcgcgtgcgc

SEQ ID NO: 53444 - DNA, 473 bp, Mus musculus
  source 1..473: mol_type = other DNA
agggtcctgagtctgtggatcatagatgtatgagttatagctgtttcctctttaggcaactctaagattggtacagaatgctgaaatcttgcataagattttcagtctcaaggaaatagtattttatagactaggtataaaatacatggcttggtatagtgctggaatgatttttgcacaaatagtttacttcaggttctgggaaaatagctcagttggtaaaatatgaagatctcttgcttcactgaggaatcctgtatcaatgatctacacatgcgtatgaactcaaatgcatgcacaccaagatgcacacatgaacacatatttatttcactgcagcttaattcaggcttcaagatgtaactggaactatgaaggctcccaggagattgaaaagagcagcttcttttcatgtttgtaactgattggtcacttaggtctctgttaagttggcagctagcattataaaagcc

SEQ ID NO: 53445 - DNA, 650 bp, Mus musculus
  source 1..650: mol_type = other DNA
attatttaatttttttgtgaaaatgacaagttaagataccttaataacattctgaaatgtataattttctgaatttttcttcattatggagaacaaaattgatttctatttgtttgtgagaatatactactgtaatctcgaagtgatagatggttcttctggctttataagaagagcagaggatttataatagggcatggttatcagatatactcgcctatgtgttggaaagacaggttcctgacagaaagtttccttccatatttgaaatataaaatgttatcatctatatttctatcttaaaatttatcttatgatatatattatcctcattagtttaattaaaagctttctgtattatcattcacagtatatgttgatattttatattagtgtctttgtaatgttatattatttgaaaactcattttattttgttactgtgaaagaattgttaatgttttatacaatataaaatttctttttatttgccagttctatataatattaaacttttctaatagtataagttttcaagtgctcaataacttgagaattcagaattttttacaacttccaattttctaacatgatttttcagttgtctacaggatatgctgttgtataaatgagagcaaaggagtatataag

SEQ ID NO: 53446 - DNA, 571 bp, Mus musculus
  source 1..571: mol_type = other DNA
gtatcatttaatttttttgggaaaatgacaaattaaaatacattaataacattctgaaacctataattttctgagtttcttcattatggagaagaaaatagattttttttattgtttctttgtgagaaggtgttcatctggctttataagaagtgtataacagtggttatcagatttactcgacatctacgagtaagtgtcaggacgacaggttcctgacagaaagttcccttccatatttgaaatataaaatgttatcgtctatgtttcaatcttaaaatttatcttatgataaaaattatcctcattattttaattaaaagcttattgtattatcattcacagtatatgttgtttgatattaatgtgttatttgtgagagaacagttaatgttttatacaatataaaattcctttttatttgccagttatataaaatattaaacttctataatattataagtcctctagtgttcattaaattaagacctctgaattttttacaacttccaaccaatccattataaggatatgctgttgtatgagactcacatatgtgttatatataagc

SEQ ID NO: 53447 - DNA, 569 bp, Mus musculus
  source 1..569: mol_type = other DNA
cctcaatatgcagacaaaaatctattttaaataaaaatcttgtaataaaaccacgatgaattacttcggcaacaagaaaatctcattgaatttatattttctttgtatgaactgtttgatacttacagatattctgttagtctttttactgttagaataaataacgatagtcttgattttccataacgtgttacaggacaggataatatataatctcttattcaagatgtctgattaacactaaacacactttatttacttagttatatttgtcagagtctattaaatacttataaagctacattttttgcgaatgcatatgtaaatgtttaaggtaacaaatgttttaaatgtacagtaaagtatacagttaaatatatagttacacctggacatggttgctcatgtatagactcctaaacttgggaagataaaggctacatcatgagacatttaatcatgaagaacagcttatttttgtcattatcactaggataaagtccatgtaaagttagctgattagtcaattatgctgtaatattgattctgcagccacaagataaaagctc

SEQ ID NO: 53448 - DNA, 626 bp, Mus musculus
  source 1..626: mol_type = other DNA
aattgtgcttaggcagaattacatgttcattagtggaaagtgaagaattctaagacttttctttatgaagtgagacactaacagttctttttgttccactagctttagcaaaagaatactagcttagctttttattatacaagagtttaataaggagctataaagcttacattattgaacaaaatatgttggcatgtttaataaaggaaaaaaatcaagtatgcatgatcatgtggtgcataaatatatttctagctatcgaggcaatatagcagaaaaattcctccctatgttatatcatatgacattatttaaaaataaatttatttcttagagtataacaatattcacaagttatatatgaaatacatcatttatgaccacctgttcactatatgtaattgaggagttatcttgaatttcaaaattaatctattacttttcaatgataactgcatattagaaacatgtttgtttacttttagtagcaatacttggacatagatattcaaatgggcaccatataatgttcaagggtaaataacatctctatcaaggaacaaagtttatttgaatgagattagaaattacctaatgaacatgctgtttaattgctataaaagatc

SEQ ID NO: 53449 - DNA, 753 bp, Mus musculus
  source 1..753: mol_type = other DNA
ttttaagacttttctttaagaatctattggaaagtcagagtagtaagcatgctcattagattggattttaaattcgctatgagctgtaagacactgacagttctttttgtttcaccacctttagaaaaggaatactgatcttgttaagttaagatatttgttttcttagttttatatttatcaagagtaaaataaggacctataaatcatgcatcattgaacaaaatgtgttataatgctgaatatagaatataaatattttaagaatgtatgttctggtcttgcaaactttatatgcttgaaatgtggaaaaaaaagaatgtatgatcattgtgttgcataaatagatttctagctattggggcaatgcagcagaagaattgtcaccttgaagacaacctatgttatacagtatgactttgttaaaaggcaaacatatttcataaagtatataaatattcataagttatatatgatataagtcatatatgactatatggctgctataaaggttgagaagttttcttgaatctcaaaattaatctattacttctgaagaataactgcatattagaaacatgttcatttacttttatcagcagtacttagacaccagtcaagggtaaattacatcttatttttatctctatcaaagagacaaagtctattagagagagataaagggagattaaatatttcctaatggattagtcaatgatgctcaagcatgttttttcagtgttataaaaactc

SEQ ID NO: 53450 - DNA, 600 bp, Mus musculus
  source 1..600: mol_type = other DNA
taagtgaagaattctaagacttttttttttatgaatctatagcaaagtgagctgtgagacactgacagttctttttgttccaccagctttagcaaaagaatactggtctttcaaggttgagtaaagatgtgtgtcttagctttttattgtacaagagtttaataaggagctataaagcttacattattgaataaaatatgttggcatgttcaatataggaaaaaatttaagtatgcatgatcatgtggtgcatatatatttctagctattggggcaatatagcagaagaactgttagttagaggcctacctatcttatatcctatgactttgttaaaaataaatttatttcatagagtataacaatattcacaatttatatatgaaatatatcttttatgacatacatactaagatgatatgtattatcttgcatttcaaaattaatctattacttttcaagaataagttcacattaaaaacatgtttgtttacgtttactagcaatacttggacataagcctgtactgtgtaaataacatcttctttttatctctatcaaagggacaaagtctacttgaaagagactgctgtttaattg

SEQ ID NO: 53451 - DNA, 509 bp, Mus musculus
  source 1..509: mol_type = other DNA
agctgaaggagtcagatgcagatatttgcacccaaccaatgggcagaagcagctgacccctgttgtttcagcccacatacattagagaactgctgtgtctgtgttcactcagagatgcacctaaccctcaagggactggagaccccagggagtttaaagttcatggactgtaaaaaataaattaattaattttaaaaagataaaagaaaaaaatgtgttagaaagtgaataaggaaattatatatgttgtttatgataaagaaaaaagaagaaattgacataattttagtacaatctcataacttttacaaattaactcaagtgtatatcaagttttgaatgattattatttatcagccgtacttgttacaactcaacaaactacaaaaatgacaatgataaaagtgcttgttttttgttatcattgagacaaagtccatttggaagcaaattaaacagtaactagttcaaacacaaaatattgatttgcaaatgatgtataaagtgtc

SEQ ID NO: 53452 - DNA, 428 bp, Mus musculus
  source 1..428: mol_type = other DNA
taattgttcctgtctgaaagtcagatgcagatatttgtacccaagcaatgggcagaagcagctgacccctgctgggtctgtgttcactcagagatgatgcacctaaccctcaagggactagagaatccagggagaatgaaaaaaataaaataattaattttaaaaagataatgaataaggaaattatatatgttgtttttgatacagaagaaaagaagaaattgacataattttagtacaatctcataacttttacaaattaactcaagtgtatttcaagttttgaatgattattatttatcagccttacttgtcacaactcaacatacaaaaatgacaatgttaaaagtgcttgttttttcttatcattgaaacaaagtccaattggaagagagttaaacagtaactagttgattgtacaagatgac

SEQ ID NO: 53453 - DNA, 448 bp, Mus musculus
  source 1..448: mol_type = other DNA
ctgaaagagtcagatgcagatatttgcacccaaccaatgggcagaagcagctgacccctgttgggcttcagcccacatatattagagaactgctgtgtctgtgttcactcagagaaaccctcaaaggactggagtccccagggagtttagaggactgtaaaaaataaattaattaattttaaaaagataaaagaaaaaatgtgttagaaagttaataaggaaattatatatgttgtttttgataaagaagaaaagaagaaattgacataattttagtacaatctcataacttttacaaattaactcaagtgtatttcaatttttgaatgattattatttatcagccttacttgtcacaactcaacaagaaaatgacaatgttaaaagttcttgttttttcttatcattgagacaacaaacgcaaaatattgatttgcgaatgctgtat

SEQ ID NO: 53454 - DNA, 467 bp, Mus musculus
  source 1..467: mol_type = other DNA
ttgagtactctgaaagagtcagatgcagatatttgcacccaaccaatgggcagaagcagctgacccctgttgttagggcttcagcccacatacattagagaactgctgtgtctgtgttcactcagagatacctaaccctcaagggactggagtccccagggagttggactgtaaaaaataaattaattaattttaaaaagataaaagaaaaaaatgtgttagaaagtgaataaggaaattatatatgttgtttttgataaagaagaaaagaagaaattgacataattttagtacaatctcataacttttacaaattaactcaagtgtatttcaatttttgaatgattattatttatcagccttactggtcacaactcaacaatacgaaaatgacaatgttaaaagttcttgttttttcttatcattgagacaacaaacgcaaaatattgatttgcgaatgctgtata

SEQ ID NO: 53455 - DNA, 536 bp, Mus musculus
  source 1..536: mol_type = other DNA
ctttaaatacacagttaaatatagaaatagtaatgtatgcatatattgctactcatggaggaaacagaatatgaacattaagtttgaggctagcctgaactgagacttttgaagaatttccatttatttaaaagttaactaaattgagtggtacacccattgtttcaattgaacaactctctatacttaatgtagagagagaacaattggttatacaatttcaaatgatcagtccccattatacagatttagcatgctatacttatatttttagaaatatatatgtgcatagaaatatgtatataacaactgaatgatactataaatctcataaaataatttttaaagattaaagtattttcaagaaataaatattgatattgtaaagatttcttttaatgttcatatttatcagcaatattggtcattaaaaagcaaggtaaaagaagttcttttttgtcctagtattgtagaagtctagttgaatgagagattaagcaatgtttgattagtcaagaatattccaaagtgcaatc

SEQ ID NO: 53456 - DNA, 349 bp, Mus musculus
  source 1..349: mol_type = other DNA
ggattaatatagtaaaaatcgctatcctgccaaaagcaatctatagattcaatgcaatccctataaaaattccaaatcaattattcactgaattagaaacagcaatttgcaaatacatcgttgaattgatccattcttatctccttgactgaacagaacagcaatggcttgtgttgtaagacatcatatatgataaatatgattgcaatattggtcacataaagaacaaggtaaaagaagttctttttgttctagtattgtagcaaagtctagttgatagagagattaaacaatgtttgattattcaataatattccaaagtgcaattgattgttctgcaactgcacta

SEQ ID NO: 53457 - DNA, 442 bp, Mus musculus
  source 1..442: mol_type = other DNA
gttgtgaatttataaatcccagtttctcattctcaaatggaaataatcgttcttaaaaaagaaactcaggaatgtgataacatctttgactgcaattctttaagtttttaagaaactccataccacattctatttattatattttttaattactaagcatttgaaatgtaaatgaagaaaatatctaataatacatagatagatgatagatagatagatagatagatagataatagatagatagatagatagatagatagatagatagatagatagatagatagatagatagatagagttcttatttatcagcaatattggtataaagaacaaggtaaaagaagttcttatttgtcttagtattgtagcaatgtctagttgaaagagagattaaacaatgtttgattagtcaagaatgttccaaagtgcaaattgatctgga

SEQ ID NO: 53458 - DNA, 237 bp, Mus musculus
  source 1..237: mol_type = other DNA
cctgtcctgcctgcaagatttgtcaacttgagttgtctgacactgtataaatagtgatttccagcagctgatggggtcatatttagttaagatatcaagggagaatgttgtaacgacaaacacctttttacagttgctaataatagaaaaaagtaacgttaggaaacgggcagttttatttaaacagaccactcaaagtccaaactctgtgtactttcggaaattgcatttatagtc

SEQ ID NO: 53459 - DNA, 330 bp, Mus musculus
  source 1..330: mol_type = other DNA
tttttactcagggtgaagaagcatcagttttgagaacttattttgggaattgttggttcacctaccttcaatttcaggtttctaggaacttcgcattggaaagcttccagggtggcccaaggagcctggaaaatgattagtagcaaccccgagttgttgcgccttaggcttaaacggctctgcggtttccaaaagtgtaaaccgctctgtggtctcacctagctttcatgccgggtcctgcgggcccgctgggagtggaggcgcgggccgggcggggctgcagcgacgcggccggggcggatctgtccccgccctcgctcgcgaccccgc

SEQ ID NO: 53460 - DNA, 469 bp, Mus musculus
  source 1..469: mol_type = other DNA
tgaaagctgtaggaaattcaaattttaatgtccataaatcagggtgtttggaagtacagttccttgctgtggtgcacagcacacagaatcactgggtcttattattcatttgtgtttcacataattcttagcacacttaagctttgactgtgatctgtcatgtgaaatcaaatcaggtatgggtttttcttatctaaaaaaattttattagatttatttattcatgcctccctttggcagaggccagaagagggcatttctgggattcctgatgaatttcatttaatgtgactgaggcttccttcagtcagactctagggcccattaactcagcctgctcaggcgcagtcctgagcctactaggggctggggacctgttgcctttcagtctgtaaagtaagaatgtcaaggaacaattgtttcttcattcgtcagcgcctgtgaacacatcatggtctcacagacgagg

SEQ ID NO: 53461 - DNA, 455 bp, Mus musculus
  source 1..455: mol_type = other DNA
tagaagtttggattcactgacttggtgacccataagattcaaaatctttgctcctgcatcatggactgagaagtagtggtgttccctttagtctttctagacaatggcctccctgcaacgtatgggacgagaacgttgccagcccggaaggataatcagtggttattaataatcagagattaaacacaccgtcttaaaatgcagtattcttaccaccacctttgctgaaaacacttgggctgttattttcgggtaactaggtgccaacttgttttaccatggctaatgtgagtctgacatatagacgataagccccgcccctatactctgcgggcgcggagcctggggatgggagggggccgtgggcgcgattctcagaagcgcctgcgccgttgccgtggcgtagcggacccgttcagcggcgctacggggcttcagtctaacgcggctgacgc

SEQ ID NO: 53462 - DNA, 332 bp, Mus musculus
  source 1..332: mol_type = other DNA
taactaacactttttaaaaaataaaataaaatttaacttgatagagtgttaaattccagacccaggaggttcagaaattcagttgaaataagcattgttttattatgctttttaaaaaataccatagtaattaaagtggagacatttttaaattttattttagattttagcgggtgtcagatggcgcccactgaggccagagagaaagggcctcttaccttggtaagactgccagctgccatctagcggcgggatcaggcagctcccagcggttgccaggtaacgggaaccaaggacgctcagggtcgtacggctcccgcctgagccaatgc

SEQ ID NO: 53463 - DNA, 437 bp, Mus musculus
  source 1..437: mol_type = other DNA
ctattccccaatttgcagagtggtgcagccaataatccgctctagaggctgagcagcctctaatcccaaaataaataaataaataaataaataaataaataaataaataaataaagctttttcacagaatataatcagactgacagtgccattggcaagcttttattcactacattttatcaagaggaattatggtgccattttacagatcagcaagagaccacagggccagcgtctggagtcactcgcggttagcgggtgcgcgcgcgacatccgcgggaacccgcgggcgcgcgccccgctcacagggacgcaggcttggcggcgggctccttcctgtcacggccggccaggccccgccccctgggcgctgccggagtggacggttccaggctgaggggctggtcgccgccgcccattggccggccccagtgtcg

SEQ ID NO: 53464 - DNA, 242 bp, Mus musculus
  source 1..242: mol_type = other DNA
acaagcagctttttaaagggcgtggctacccctcattacagctggcaagaggtatgagcaatttgctcagtggtcccataaggcttccggaggagtgattgctcaaggaagagcagctcttcctctcacactcaaggctaccaacattatagttgcaaggcttggagagtagaaatgtctttttcaagggataaaagtagattttccaatctgtatttctagtcaatgaaaaagacatcggg

SEQ ID NO: 53465 - DNA, 554 bp, Mus musculus
  source 1..554: mol_type = other DNA
gtataacactgtcacacaggggtctgcagcagcccttccgggatggaaaaatattcaaagtaaggggtgaggtctcatgatttatgtttaaatattgaaccagacactctcaaatacaactgtcaattgacgctggaagatggtcaattacatccattatggatctgacaagccaggttgctccagtcgcaactcgcgcgaatcggcgccttagggactggtaagagctaaagcccattcggaacccctcggaagtgagacagcgggccagatccgcgctgccaagttttaatcccggggctgagacatcgcatctttctttgccagcacccgggacccatcaaagattctctgcaggtgagcggccctcgggcgccgacagaccgcggaggctgcagagcgagaccgcccggcaccgggcaggggcccgggagacggagtagcacctggctcggcccggccgccgattggacggcgaggcgcgaccccgctgtatcgcgagagccgattggcagcgcggggcggcccgtgccccggcgctggctttgtacggc

SEQ ID NO: 53466 - DNA, 525 bp, Mus musculus
  source 1..525: mol_type = other DNA
ttaacagttttaaaattggttttaagaaaaatttgtaaattctcagattcgttctgctgagaggacttccttcgctcagacgagtcctccgtgccgtgggaggaggtcgtgtcgcggcgggagagaagagtgtccctcacaggagctgctctggagctcagggttggctcccttgtgggccagagctttgggtagcagcttcgtccaaccactgggacgtcaaagggaactcgcgtgatccgagtaagtacagggaacacgccatttgctaagatgggggctgcctaaaacctctgggttgaggccatttcctgtcaaccaaggcttgtttccccgttcttccccccgcagtaggatccccgcggctggtgagtagacgggcgccgtatgacgaggtcagccgtggactcagcgccatggcctactctcgggaggctgaggcgggggcccttccggccgccgttcccttccgctcgcctcaggtgcagcgcggatccctccgccgcagcgtgcgctgccggcagc

SEQ ID NO: 53467 - DNA, 219 bp, Mus musculus
  source 1..219: mol_type = other DNA
tggtcctttgataatgttcagaacgtaatctcctttcacaaaggtgaagaaagaacacgccccccctacacctgacatgtccctgatgtcatgtgtgggaatcactaggctttatttgaaaatggcaagctttcaggtgacctcggtgacaagaactgtccatttcatgtcttagttcttaagagttaatcagccaggctggctgactccctggatcac

SEQ ID NO: 53468 - DNA, 268 bp, Mus musculus
  source 1..268: mol_type = other DNA
cagtggttaggagcactaactgctcggcagcttacaactgtctgcaattccagttccagggaatctgaggcattcacgtgaaatcacaacagctgtatgtaacacatctgtgccaattacagattgctaccaaagcaaatgtaatacattttttaaaaaatggcttttaaaatgcaacctattcttcataagtttattctgaggtactgcagagatcagttctttttgggagaaaggacctgatcagagtgagacattccttcagcag

SEQ ID NO: 53469 - DNA, 331 bp, Mus musculus
  source 1..331: mol_type = other DNA
agggacccatggctccagctgcatatgtagcagaggatggctgccccagtataggggaatgccagggccaataaagaaaatattaaaaaaaatcataaattattgaaagtagccttcaaacctgtcaccgggctggccagggactgctgggcgtgctgtcacaaccctgcctatggggatggagaagttcacccctctgtgctgtgtccgcagagagggtcccttgggactgtagtcacaggccttttgtggcttctttgctgcaaagtaaaaaggacatcatctgcactcccctgaccatacatggcatggtgagggctttcctgggagt

SEQ ID NO: 53470 - DNA, 367 bp, Mus musculus
  source 1..367: mol_type = other DNA
tgaggtattacacgaacatttagagaagtgtcttgctacgtagcctggcaggcttggtactgagcctgtagataaggttggctccaatcttgccgggattacacttagctcctgcatagaagtctataaacagtacacggtgatgtttaaacaccagtttaataatcacgccgtggcgagctaggcgcctgagccgatgtcaccccagcccgcccgcagccgggcgcgcaagggcccaggcccaggtccaggccgaggctgagcaagcagcacagccaaccccgcggcctgcgcgcgccggcgccccacggccggcgacggttgcggccccgcgtcgggaggacttccggcgtgtgccggggtggcc

SEQ ID NO: 53471 - DNA, 557 bp, Mus musculus
  source 1..557: mol_type = other DNA
aatcttcacagcacattgacgtgctataatgcttgattagggcaatttacttgtataaaaggatctttgaaaaaggtatatctccctaaataatctgggtgcatgtttttcactggcacaaaaataaccagatttaaagaatcgctcatttttattttatcaaactaacggcaaggcttgaactttaaattgctcatttgtgagtctttgactatcaaaagcatcccaattgggacagttttactgaggaccacccacaacttcgggtttggtgggtgctgcagcacgcacctgtgctggtgggaccagggaaagagtggagagaatcctgctcattcccccctacactgcattctgcagagaaacgaatttcgaaagcacgaagttggcagcacgaggtgtccaggaccctcaatgttgagcagtgttgcgcgcaccacagtgtcaaggccaggtgggcgtgcgccccggggagcccaacacttgtcccttgggttccttcgcctaggcccgtccagccctggtggagaggggcggagcggccactgttcctaccg

SEQ ID NO: 53472 - DNA, 515 bp, Mus musculus
  source 1..515: mol_type = other DNA
gaactatgcccaaagatacccagactcaaatctctaggatctgtgaatttgctacattcaaggggcccttagatgcctgctgcctagtgtctagccactttggtggaaggagagaacagactctgtccactctgtgaacacaagcacacaaaataaataaactaagatttttttttttttttttaaagtggagtaacatctatctatcaaagaaagggcaacgccaagaccctagggccaggtgcttctcctttcttgggggcagtgtctcaaggacaagtcccaagggacaaggtggttgggacagctgtgctatgccagtctgagactagctagccagcacctcagactgctcttgggggacacgtggcacgagcaggggtcggcgccgggagctggcggctggtcgtgtggacttctcacttcccctccccaaccgccgcgcgtgcaggtgccacgcggagccccgcaggcggggcagaccctctggacacgcccccgtgcgagtccccgct

SEQ ID NO: 53473 - DNA, 548 bp, Mus musculus
  source 1..548: mol_type = other DNA
tttcaaataaatcaagtaattaatagtgtgatgtttaaacaaaacaaggctccctgtgcaaggtggtttaattatcccagaaggcacctgtttcccaacatattcttaagctgttgtttgaaagtttgaaattcattttctactagcacaaagactttcaactatgatcagtcttgctagtaagagatcccctaggctttttatttgacttaaaagataacttaaaacttaaaattatcccacggcgcccccgtgggaggagccgaagccccggggagggccggggccaccgtggcctgcctggagagcgagggcggcgcggggaccgagcgccggcgtagaaagacgccgttccgggcggggcggctggtgcgcggggacgccgggcgggcgggcgggcgggaggaggagcgggccgccacggggccacggggaggtgagcgcagccttgcccccgcgccgcccccggcgggaggcgcgacgcccaggccacgggtgcgtgcgcggccccgggcgacgcggctgggcgtgcgcggggccgcggcgga

SEQ ID NO: 53474 - DNA, 633 bp, Mus musculus
  source 1..633: mol_type = other DNA
attatcctgggctatttatagaaaccctgtctcaaaaataaaatttgacttactatgagagtttaaaatttgttataattttatataatagatctttcatgtaagaactaccaaacctgctggattttttggttatttaataccttctaagagactcaaatgctttcagtcttactgtaaagatgagaattcctttctggaaggaacagaggttaactgttactgagactctatagtctccagggtcaaaaatagatagtatttggccattaatttcttcttttctaatgtttgaaagagcaagaggacacagtaactaattacattaggtaaataacaatcagctgtttgattagtgggtaatttaattttgttaatacctttagaataatttgatgtcaagaaataaaattgaaaaataattgctttctaatgataaatcaaaaagttacagtttaaaaataatataaaaattaactctaattacaatacgaacttcagtagctactgtattgcagagtagagcaaagacattttaattacaatattatttttattatcagtttagcaagatagtactctgccttttaattttaattttaattgtatgtgtaactaagacaattaagagtc

SEQ ID NO: 53475 - DNA, 581 bp, Mus musculus
  source 1..581: mol_type = other DNA
tatacacaataaggttttcaatgactaaattctagtcgtttcaatgaatgacgtatatcacatattaataagagtgttctaggttttccataaataaaagggccaaactaaaaaactcttatcctttgacctaaaactccactcttaggaatgtactctgaaaaatgaatcataaatttggaaaagttttatggttgaaggaatttaaacaattacaagtacttaatggaaacttacgttgcagtcaccggaaaaagctttatatggttacgagaacattttcgtttgaactacaaaaaaagtcagaagctctgaccacagggtcggcttcccaaccgtcggggtcgcccctccccgggccagcgcaggcgttacccacacgtggggctggagcgggcgcgagtgggagcagccaattggcagtcgccgagggtgcctcctaggaccgagaggtcctaggacctgggctcggcgaagtcggtgccccgtccccggaatctctgggcagacagtgtgggcagtggtctcgcgaacgtctccccccacggtcgcgcgcggtggtaggagccgcgcgacgtagc

SEQ ID NO: 53476 - DNA, 270 bp, Mus musculus
  source 1..270: mol_type = other DNA
gtttgttaattgtgaatttcatatatcaataccatgagtcacccaaggaggcttgtttggatgacccaaaattttacatacattcatacataaatacatacatacatacacacatacatatatacacacacaagtttacttaggttatataccattgaagaaaatgccttttcctcttcaagtgactttaaaaaccgacagttttgtaactcagagattaggcctcgggcaggtgttttatttgaatagaccaatagtagcatggaacgc

SEQ ID NO: 53477 - DNA, 344 bp, Mus musculus
  source 1..344: mol_type = other DNA
ccttttgagaggaccgtataccagtagagacaaagtcctgtcaggactcctgtcatcccagctggctggagaagactaaggcctgaggcaggctgaggccatctggtacaagaagcctcaccaacagttgacaaaggaagttggtggggcccggtgacctcttcagcaaggtgtagggaaaaaaaatctttttgctcctctgccctagtagctgagggtactgaagatgtacacatcattgcaccttccccgggcccccgcagcccttggcgcctgggaggcggctcctctgtgtgcgcgcgcgcgcgaggtgtgtgtgtgtgcgcgcgcgcggggcctgccca

SEQ ID NO: 53478 - DNA, 244 bp, Mus musculus
  source 1..244: mol_type = other DNA
cttaagaaatacatcttttaaaaatagtactagtttccacatcagggctgtgttcttggcaacagggcaccaccaatttgcaaagcaagtcgtaaactaggctggctttaaactcacgacagtcttccaagccctggctgccctggaactcactttgtagaccaggctggcctcgtatctttgagagtaatataaatttgtcttttaattccaaagaaattcccgttttacgaatcttggcggt

SEQ ID NO: 53479 - DNA, 396 bp, Mus musculus
  source 1..396: mol_type = other DNA
tttattattatataatatgtagttataaatgcatatgtatatatttattattgtactattatttttataataataaataataaatttatgggccacagggccgactggagcgagctgggcctactggcgtgatgaaccacgcctttaatgaaatctctgagttctaggcctggtctacagacgtcttatgacttgtccgaagtacaagtaagcgcggcgtgtccagtcggcgcctggagctcaagctcgcaaccagcaccctccgcgctccttgcttacgtgcgctccgtgactgccgggtagcacgcgggtaccgctacgtacaacgcatgcgcactgccgccgcggtgcactacacgcctgaggcgcatgcgcacacggggcgggcggctgcga

SEQ ID NO: 53480 - DNA, 484 bp, Mus musculus
  source 1..484: mol_type = other DNA
tttttagtcagaaggtccagaagggcttctctgggacttagtgcactattactacattgatgtcagtgacgtgggtgcatccacagaacttaagtcagattaacctaacgggtgtgcggccggtgtgcttcagcacagcgcagagatcacagctgcggctgagcctgctctgcctgtgcacccggagagggaacgcgcgctgggtagccgcttcctttacccgggtgtaggtgccgctgccggggctgccagctgcctcagccacgggctcccagaagctggttgccacacagcctggaactgcgtgcggagaccgctcacttaccggggatgcagtacctcaccggtggtgccatgcttgccaccatccacaacccggatgagaaccaagacgacttctcattggtcaggggtgtaagaggtctattcccaggctgccccgggacagatctctgggcgtgcctgcgggctccgggcctcgcgc

SEQ ID NO: 53481 - DNA, 287 bp, Mus musculus
  source 1..287: mol_type = other DNA
tttttttttaaagatttatttattattatatgtaagtacactgtacagacacacctgaccatggcagttcttatttaaaaaagcatttaattagggctcattgtcgtcacaatggggagcatggtggcatggtagagcctctccctgaggaccaggcattcaaatagatgaacctttggtttcgctgtgagtttatatgaaaatgaatactaaaagtcaaggcaagcctggtctacaaagtccaggacagccaggaaaaaaaaaaaaagactttcctgtttcgctaa

SEQ ID NO: 53482 - DNA, 344 bp, Mus musculus
  source 1..344: mol_type = other DNA
atccggaaaaagctgctgctcccggaaccttaatattctattaatgaaggcttctttcccggctaacatgcgctcattcatagttaaggagctcacactctatagagtatctgccagtttgttgtacatcaaactcattaaaggcccaggacccaggccgggccgagctaaggctgacccaccatggccctcagcccacagcgctagccagcggaccgggacccgccgcccgcccatcaccacccagctgcgcaggcgcgaggcccggagcccgcaggcacgcccagagatctgtcccggggcagcctgggaatagacctcttacacccctgaccaatgagaag

SEQ ID NO: 53483 - DNA, 788 bp, Mus musculus
  source 1..788: mol_type = other DNA
acccaagcgcccggcgccgagcgaggtcgctcgggaaccccaaggttcgggcaaggcaagggccaactggcagcgcgccgggaccccgctgcctttcctggcgtcgcttgcgggggtgtcccggagcagccggcctctcccggcgctccatgcaccagaggcggcggtcggccggctgctccacgctgctgccccgaaccgcggcgtccccgggtcaacgactcccgcagcccgacatcgagagctcctggatctcccctggggagcgctctgcccgacgccggcttcgccacaaactttgcgggccagcggagagggaggtggccaggccaggggggcccgcgacagtgcccggccagagaccagcccggctggaggggcggagggagggggcggacaccgccgcagctactcactccgagctcccagctggggccggccccccggagcctgtcaccccggcccggcccctcccgcttggggtggccgcgccacggtcgccagccgccccaggtgcgcatgtgaccgacggcaccgcccctcgggccggatgcgtaccgcccccggccccacccagccaggtgcccgccctgtcgcccgtctcccggggagagcggccgggaattatgcgccctcaaccgccccggctgcgtgcccggcagtcacttcccctcccggagccgcgccccggcccaggccccgccctctggggaggggccgttaggtccctgaagggactgcctggcccagagccggcaggcacgtgacctggaggtgccccgcccctg

SEQ ID NO: 53484 - DNA, 659 bp, Mus musculus
  source 1..659: mol_type = other DNA
tactctcggagaaatgtaatgattctctatggaccacagcgagcagtagcgctcccagcgggggcagccttcccgccgcgcgcgggtgctgaggccgctccctgcggtccggcccctgcagaagcctcgccacctggtcagcgggcccctcctgttgacccatgaaagtcttgcacgaggccacacagggcgcccataggcgccactgcctcctccagaccggtggcggcagccatgacgcaggggcggggcacctccaggtcacgtgcctgccggctctgggccaggcagtcccttcagggacctaacggcccctccccagagggcggggcctgggccggggcgcggctccgggaggggaagtgactgccgggcacgcagccggggcggttgagggcgcataattcccggccgctctccccgggagacgggcgacagggcgggcacctggctgggtggggccgggggcggtacgcatccggcccgaggggcggtgccgtcggtcacatgcgcacctggggcggctggcgaccgtggcgcggccaccccaagcgggaggggccgggccggggtgacaggctccggggggccggccccagctgggagctcggagtgagtagctgcggcggtgtccgccccctccctccgcccctccagcc

SEQ ID NO: 53485 - DNA, 347 bp, Mus musculus
  source 1..347: mol_type = other DNA
agccagagacagacagggctgtctcctcctgtttcttctatcaccagaggtgacctcgggctccaggctgggagtcccaggcgaggagctcaagtgcagggacttcctgagctcttacaggttctgttcatggctaatggacacgccatgcagcatagccgtgtttccctagggcccatgggacccatagcagccaccagagggcagcagccgttccacatccagcaggtggcaccctggctaagacttagccagttcccagcaggggaggggcaagttccctggcctggacagtggcttccaaaggcgcccagtgggcggggtgggtgcttgggcctataaagacc

SEQ ID NO: 53486 - DNA, 285 bp, Mus musculus
  source 1..285: mol_type = other DNA
cggcatgccctggagcaaacacaataaagtgctggcatgtttcacactgtggcatgtccctgtgtggccagcagagggctaacacgtgacggcccttggcagccacttgtagacaggaggagtgatttttcacaactgcttctggagtagggcggggccaggccagctcaaccaatatgttcagccagcctggaatccaggccctggcgctttccagcagggaagaaagccggcctggagactctctaggttgtggtgggaacacaaaattttaactgtgtatgt

SEQ ID NO: 53487 - DNA, 223 bp, Mus musculus
  source 1..223: mol_type = other DNA
atttttttttttctagctacaaacaacacagctttggcatttttttctttctttctctcagataaataaactgtgagggaaacagtagcacaggctagccaggctcaaaactttaactcagtatcctctatcctgtggcggccactagattgatgctatctttctttctatggagaaaaggagacaagaccgtctgagtgatgaggtgaatggggctcattgc

SEQ ID NO: 53488 - DNA, 544 bp, Mus musculus
  source 1..544: mol_type = other DNA
actttaatctacaatctattccacagtttagcttatattacctagtgagtattattaataccatattgaatttattggctaagttactcaaaaacatacacaatttgtaagtagcgaagataggatttgaacacagaaatcaaatcttttcaaattaacttcaaactaccgttcttttcctgcagctgaagaaatcccaatccaaaaagctatttgaagccatttgctttgtctttcaatgcctcacacatgtcatatgagttccatgagagaaacagtatttgggaagatttgctccaataatagcaatatattttaaataagtgattccctatgaatgcaaatgtgcagcgcatcattaattacaaagctgagcttctaaagcacggtttcatctaaaaatcacaacctttagagagggtagccactttgaacacttgttcagccttatttaggattaaagtttgacagccggctcagccccacctctctttcagatctttggcccagactcctgctcgcggttgcctaggtaacagccaat

SEQ ID NO: 53489 - DNA, 393 bp, Mus musculus
  source 1..393: mol_type = other DNA
tcagtaatatagctacaaagcttcttccttttattaatgaaaacgaggaccaactgtgtattcaggtgaataaagtcacggactaatttattcacatagtatatgagcaaagcatactatgtatcatggcaaggtttaaaggtttaaagcatccgtgcgatagcacaagtgacctatgtcattgttgtgacacaaaaatgacattttgcagtttaaagcttccgaagatctgtctgccaattggaagctgaacccgggtttgtctcgagcatgcgcggtctccacagaaggtgacgcgaaagctaaggaggccgcgattgcgtagggtgcctacgcgtcgccggcggagctacggaggcgcggctccctggttggccaagcgggtcacggccg

SEQ ID NO: 53490 - DNA, 342 bp, Mus musculus
  source 1..342: mol_type = other DNA
tggagaaaagccgtcctggctccaatgatgcagttctcttacagcccgtcaaggaaactgaaaagagctgttaagttctccttaggtaaccaaactggcacatcttaacagtcctacggggcacttgtcacgtgtaccctgcagggcccgcggtctccagccgcaccccgtgtcaggaatgcgaccccgccccgcctgcgtgcccgcaaagcagagcccgcccctgggactgacgtcaatcaagggggcgcctccaggcgttggggaggacccggaggacacgcccctcgccgatggagggataaggcacgcccctcccccctgcagcagctgattgcgaag

SEQ ID NO: 53491 - DNA, 356 bp, Mus musculus
  source 1..356: mol_type = other DNA
aacagccaggtcagtttgtaacattgctgaaagagcagagaagccatctctggcttcctggtctgaatgtaatgtcaatgaaccttggcatcgttgggatccttgcatctctgagacctaggcctgtcctgaccatgttaggtgacatgtgttttcttacactgaagatatgtctccagtctcctgtgactggagagaatcaagagggtccagccacaggctgggcagaggctgttgtcctaagatcggccaggcctgcgaggcaggaagggctggggtggctccagatgtggcaaacttggcccagcagcctgggcaaaaggcctgtcatgggccaggcattcagccctggctgc

SEQ ID NO: 53492 - DNA, 309 bp, Mus musculus
  source 1..309: mol_type = other DNA
tcccagctccgagcagtttatgtgctgtgacattaaagaagttacttacctgttgaatgtgcacaaaaagcttagtgcagctacggaccaccgttccgtctctgctaatgttccctcgaaattactgatactactagagaaacttcagtgtgcactatagcagacagctggtttctgtgctgctgtgtcttcctgcagcaagccaggggcccaggtcctaggacgagtgcgcaggcgcagtatcaacgcgcttgctcacctgcgctgcccggaggccggacccaaggcgggacgggcgcggtgacgtca

SEQ ID NO: 53493 - DNA, 385 bp, Mus musculus
  source 1..385: mol_type = other DNA
tgtaatgtcaatgaaccttggcatcgttgggatccttgcatctctgagacctaggcctgtcctgaccatgttaggtgacatgtgttttcttacactgaagatatgtctccagtctcctgtgactggagagaatcaagagggtccagccacaggctgggcagaggctgttgtcctaagatcggccaggcctgcgaggcaggaagggctggggtggctccagatgtggcaaacttggcccagcagcctgggcaaaaggcctgtcatgggccaggcattcagccctggctgcagcagcgggagcagcgggagcagcgggagcagcgggagcagcgggagcagcgggagcagcgggagcagcgggcccgggctcgggccgcccccgcga

SEQ ID NO: 53494 - DNA, 331 bp, Mus musculus
  source 1..331: mol_type = other DNA
agtagtgatactgtgaaaattccatgaggtaggttatgaaatgtgcctaggcaaagtccagcctggtctacaaattgagttccaggacagccagggctgttacaccaaaaacataaacagatgtttataaggtcgttcagtgatgcacattatgcatggcactggattcattaaagagggctgccaagtgcaagctctgcttgcctggccaggagggcgtggatggccgtcgcgaggcgaggcgggacccgagggacccgagccgggcgggaaagactcagggttcctcccaggtccgccaacccggggcgggggtgggaggtgagccccg

SEQ ID NO: 53495 - DNA, 294 bp, Mus musculus
  source 1..294: mol_type = other DNA
atgtttggaaattttaaatgggaaaagaagtctgacctggagtcaggtcttctggctctgacctgtgggcagccaggctttctgcttattaagtagataaaccatttgattggaaggcctaatgccaaattaccaccttggagagtgggcataccgtgttttaagaaaatgctctcttatatcttttcccctagctaatgggattttacccatccgtattgcaggccgggtgcagcttctggaagtccccggaggcggtggaagctagcgcaacgctctaggcactcctgctgg

SEQ ID NO: 53496 - DNA, 652 bp, Mus musculus
  source 1..652: mol_type = other DNA
cttgggccagagcgccaccaggtgggccaggctcagccctgcccgcagttgcctgggccgccgcgcctgaccgccgagctgcgctcgcctgctccccgccctgggaccgtggtgaagctgagcagtcccccggaggcgctcggacacgtccctaggctggataaagatcgactcggagctcgctccccagcgagaaatctcgccatcggcgtggctcgcgcggccgctctggccgggcctgggagccgccagatcgctatctgggaggcagaaagacagcagcgcggccgctaccccccgccctgcgctccgcgtggctgcggggtcctggggctcgccggcctcccttccccccaggccccgctgcctcctgaaggttacgcggcgcggcggcggggcgcggcagagcacggggggcacccgccctcgccgccgcccgcgccgccgcccaccccaatgcccgccgcgccgggccagcctggctgccggctgctgccaccgcaacctcagcgcggggaggcgccccttcccccacccggctcctcgggctccccgggccgcgattggccgcgcgtgcgccccccaagcttgggccccggctccagctgccgcgccattggctgcgggcctccgccagcctttacataagccc

SEQ ID NO: 53497 - DNA, 296 bp, Mus musculus
  source 1..296: mol_type = other DNA
atgctagagagagagcctctacagggttacacagtatgaacttttcaaatatttctttttttcttaagccattttttgacaaaaaaaaggggccgggctggacgctccccttccttattctaagaattgaaataaatgataatgtccaagagcttgcagtgtttggcgacaaactggctgaggagatagaggagcgtcaacgccctcccgccctctcgccggccccgccccccacgcgacgcgacaggggctaggaggtcccgcggcgtgggcggagccaaggcctggcgcgcacc

SEQ ID NO: 53498 - DNA, 363 bp, Mus musculus
  source 1..363: mol_type = other DNA
tctgatgcatctgaatattactatcagcagtcttctctgagcaagcacttaggctgctaatgagctacattgagaaatttcgcacctgtacaagagctgccttcagttacagggtcacaagctgtacctgcaatgtccaccatacaagccttgcttcactgctggatcaatatctgtactgttgactgtaccctcactctcaacttcaaagccaggactgtgctttgacatcccatctggtgtttccagactggatggtgcagtttcagaatcagaacttagtgttactggcatagccataccatctggtttcagcagagaaatttctatttacaaaagcagagttccacattctggaatggt

SEQ ID NO: 53499 - DNA, 326 bp, Mus musculus
  source 1..326: mol_type = other DNA
aggtatttagaatatgttaggaatgaattgttaaaccttctgaatagagattgccttgtttaaccaggttggcatggtattccaaaacttactaatatataccagcaaaagactgagtttctcactgaacctaaaatgtcatttttcatctaactggctggccaacaaattaatgcagtgtagggccacacacaggcacttacattcatggctatgtagcaagtacacatcatattaaaataacagtcttatttgtaagtgataagatatacttaatgtagaaaattcgtccaatcaataaaatcaacctataacctaacttttca

SEQ ID NO: 53500 - DNA, 427 bp, Mus musculus
  source 1..427: mol_type = other DNA
ctttttctagcacataggagaaagcgccgctcactgctctgagactagagaggatactggaacagtctgctcatttcacacaagcccgaggcctggagcctggcagctgggggactcccctcaacctggcaaggaccagggacatcctgggtaccggaagtcttaagttctctgctgaacttcataatgagccaggcagccctaagactgtggggcgctcagttctataaggttaatgggacacagctccgatcgctccccgcagcgcctgggacttcccaacttggcccagtcccgagctgcgcgcctggctggtggccggccgggcggggctgcccgtgcacacaggcgcgcccggggcggggcctgcgacctcccccggggaaggcccggacttggggcgggaggctggcggataaaaagcccc

SEQ ID NO: 53501 - DNA, 425 bp, Mus musculus
  source 1..425: mol_type = other DNA
gtttttaaaaaaacagttcaggcttttggaagctggccaaagttctcctgtagaggagtgactcctgaggagtggaccggtcctctctgttcaagatagggcccaaatctttgagaaactttggaaaactggaaaggtgcccaaactgtcccagcaagactagcctcactggagtgtgcgtgagagaacacacacacagctcttggagacgtgggtggccgttgacagctcccacagcttaggtcggccccgcccccgaggcaagaggaaggcggggcctctgcgttggctcctcttctcccttagcccactaccgggcctgggagaacctaggaggctactcagactcagagccgcagaagctcggaccctgggaaacggtggcccaaggccaaggctgacaccttgcctgggcctctggaaag

SEQ ID NO: 53502 - DNA, 318 bp, Mus musculus
  source 1..318: mol_type = other DNA
agaggaacgcctcagcatgggcctgctaaagcacccctctgctgcagcatacccagtttttaaaaaaacagcgctactcaggcttttggaagctggccaaagttctcctgtagaggagtgactcctgaggagtggaccggtcctctctgttcaagatagggcccaaatctttgagaaactttggaaaactggaaaggtgcccaaactgtcccagcaagactagcctcactggagtgtgcgtgagagaacacacacacagctcttggagacgtgggtggccgttgacagctcccacagcttaggtcggccccgcccccg

SEQ ID NO: 53503 - DNA, 388 bp, Mus musculus
  source 1..388: mol_type = other DNA
agtcagactgggaacctttgtaaatcaaggagcccaaaggtagcttttgtgtcaactcgacacagctggggttatcacagattgaggaaatgcctccatgagatccagctgtaaggcatttcctcaattagtgatcaagggggaaaagcttcctttggtgatgaacaacagtatggaatttcctccccaaactgcttcttggtcatgatgtttgtgcaggaatagaaaccctgactaaggtgcaaggaaacctgggttctggttccatttctttagctatctagaaatgtcaccggctcagctggtgcctctaaatggcacggctccctagtgacggggcggggctcgaacccacaaagcaggccccggtcatgtggctgagtcacgt

SEQ ID NO: 53504 - DNA, 215 bp, Mus musculus
  source 1..215: mol_type = other DNA
tcccctgcaagggtattacttttacagtggaaacacataagcagcagtgccatggagcatagaatttgcacacctaggcttttgtgccttggcaaaaattactttgcccatactgcccctcaggcagtgaagggccttccccatagcctactggggaggggacttgaagggtaggttacctttaaaaagttaaaaaatgtctgcagtgtactctt

SEQ ID NO: 53505 - DNA, 456 bp, Mus musculus
  source 1..456: mol_type = other DNA
tctacagggtggttacacaaatttagatatgacaaaaggagttttaccccaatgtcggtttcctgcttttgatgtaaaccgtagaaggaactgagcatgtgcataaactttatccgtgaatacttttaacaaaattccaaattatatagacatattgtatttcaatttattgattaacactggtatcttaacaaggaattgcacttaaataatttggaaatttttacaatatgaaagattagctagaatttgattgaggccaataaatttcctgggtccaacctgcagtttggaattactgccgggaattcccagggctcagatatacttaagtgtatccaggctaggcactgtgacggtgcgtggccaccaggcgggtccgcctccagcccacgcgcgcaaggggagcacacgtggtgacctgcctggggctggattccgggctccagctcctcc

SEQ ID NO: 53506 - DNA, 432 bp, Mus musculus
  source 1..432: mol_type = other DNA
ttaagaggtttccggccccggttatctgcagggtctcccctgccaggatcaaggatgagtggagacagtcaaggtcacccacgattgggtacagtgtgtccaagcggaccactagagtcctgtgccagacacttggctgtcagccgggcctggccaacgcaggaacgtgcgcaccgccggagcctggcggcgacagtcacctgctcagcgggtagggccaccgccccaggtctccaggccccagaaggtcaggaggttgtcctctggggactcccgcacgctacgcaagcctccgataagatcctcttctcgaattggctagtagaggcttgccccgcctaacccttcttagtcggaaggttgtgattggttaagcgcgttgccaagctccggacgcggctcgaccattggaagccgcgggctgccccgccc

SEQ ID NO: 53507 - DNA, 240 bp, Mus musculus
  source 1..240: mol_type = other DNA
tacaagtattgagctctttgctttaagtagacagctgcaagggcaagtacggtctggaccctgcccagaggacctctaggtgtaagcttttcctcggagaacagctttccactgtggcagaactgcccctggtcgggaaggtgcagggaatcggtgattcggacacccggttgggtgggaggccaggatgccgaccccgccccttgacgtgacgcagggcccccggacagaggcttcaca

SEQ ID NO: 53508 - DNA, 393 bp, Mus musculus
  source 1..393: mol_type = other DNA
agggacaggttgtaaaaactttagattttctgtcattctgtttcttttgtgttaccatagggcccaggaggacaacaatacaaatgatggacacgagtactttgatgcaaacgtgtgtttctatcatgagagatgacagtgatgctgcagcggtgaaggccaccgcagggagctggccttgcagcagcagtctgtggcctctcccgtgcgggctgcgggtcccagcccgccctccaggcggagcctgggtgcgacgaattggtcacggccgggagtccaggggcgggcattcgtggccaggctcagtttgtgaccgccgcggcttcgccggtggctccggctgcgcgcagggcgggcctctccgggtcccctgggggacgtggcgccgccgga

SEQ ID NO: 53509 - DNA, 434 bp, Mus musculus
  source 1..434: mol_type = other DNA
gttctcgagctcatcggtccacccactggagggttcactaggcggctttgggtgggaggcccaagcgagcggatctgcgctgatggcacaccactccagagccacccgaggctcacagccgatctcccctagcggcgggttgggccgtgccaggggacgcagggtccgggctgactccgcccccgcctgagatcccgcgggaacagtcgcaccgtgctacccggtggcgtcctaacggcaaccgacagcggtttgaccttgaaggtctggctggcaccgccccctctccccggcagtcccgaccgccacgcacgccgcgccggggtacagccgggagccggtccctgtcccaatggccaccgccaatagctagagcggttgagcctatcaactttacgtttctcccgcctccgaaacgctatgtcctcggggcc

SEQ ID NO: 53510 - DNA, 301 bp, Mus musculus
  source 1..301: mol_type = other DNA
agggacaggttgtaaaaactttagattttctgtcattctgtttcttttgtgttaccatagggcccaggaggacaacaatacaaatgatggacacgagtactttgatgcaaacgtgtgtttctatcatgagagatgacagtgatgctgcagcggtgaaggccaccgcagggagctggccttgcagcagcagtctgtggcctctcccgtgcgggctgcgggtcccagcccgccctccaggcggagcctgggtgcgacgaattggtcacggccgggagtccaggggcgggcattcgtggccagg

SEQ ID NO: 53511 - DNA, 440 bp, Mus musculus
  source 1..440: mol_type = other DNA
caccagtggggctgaagatgctgaaggagtatcaggagctccatacaactgttgttagagactccagatggcttagtgcaaaatacagagcattgcccctttgttttgtttagggatatttatccttcataaaagttatttgtcttgacatattaataggcataggctgtgggaacggatcccagccaccctctaggttgtagagctgcttgtggccctaggggcggcgggacgcctgcgtgactgcccgggactccggagcacgcctggcaagccgggacccaccccggggtccaccggccgaccgcccccctccactgagtccccgcggccgcgcgagcgacggaggaggcgcgtccccgacgcccgtgcccggcagcctcccagggagtcgtgcgtgcacgcgcagtggccaacctagcgcgagggggcgcgcacga

SEQ ID NO: 53512 - DNA, 494 bp, Mus musculus
  source 1..494: mol_type = other DNA
tgattatcagagaagagaatacatgtcttcttttgagtctaacactaagagcaaaaatacaaggccagcctggtctacaaagtgagttccaggacagccagggctagaaaaaaaaaaaaaaaaaaaagtatgttcagtttcctacttctaagtaactgggtatcttagacaagcaacttaaagtaagtctcaatttccttcactggtggcttttagcaaaaaccaaatgtgagcctttatcacgtgctaagggtttgatgtatatttaaaattttaatccttacaaacaccttgtccgagccggacttgcagggcggtcctcccagcccggcttccgtgatccgagccagcaggagtgggttggacgccaccctagggaccaggagcccgacattgcggctccccgtcaaggccctcagggaacagcgccactgccggagcgccccagcgagctgcggtccgcttctccgctcccggtcaggcgtcgtgcgcgc

SEQ ID NO: 53513 - DNA, 489 bp, Mus musculus
  source 1..489: mol_type = other DNA
tcttagcactgctgaattatatacttagaactcatcaagatgatatattttatgttatgcacctttaaatgctactacacaaataatacttgataattatggcgcctttcccagcactcgggaggcagaggcaggcagatttctgagttcgaggccagcctggtctacagagtgagttccaggacagccagggctatacataagactaacattttattgctcaaattatgttcattgatccctttgatataacttgactttttcaaacaaagtttatattactttaaaccgtgttttatgtttatcataagttcttaatcaaaaaactcagaggagccaggcatggtgatgcatgcctttaatcccaggataacatctctgtgaactcttaaccgagttcaaactgaagtaatggtgattcccagtcacatgtctgctcactgggatgacatagcattcatctagcaaagttaactattaagttgtcag

SEQ ID NO: 53514 - DNA, 366 bp, Mus musculus
  source 1..366: mol_type = other DNA
attcttaaaatggttcaaacgatacactttatgctatgtctagtttactacgatttttgaagagtcaagaaacaatctagcagattttaaaataaacttgagaagtcttccggattctcaaaattgtcctgtgagactttgctcggttcccctgtaatccagcacttggaggatgaaggcgctaaacgcccccacccctgaaaggccctgggagcccgagccctgacgtggcggagcgacgggctaggcggccgccagggggcgcgagcgcgggagccgggggccaccggcggcgctaagggaggcggggcggcgcggagtcacccggatcggcccgcccgcccgccgccgctgaggggaggtgac

SEQ ID NO: 53515 - DNA, 254 bp, Mus musculus
  source 1..254: mol_type = other DNA
tctattttaatgagaaatagactaggcaaattaagatctagactcagcagctaagttgtcagtgcacaatgacagctccgggggatctgacagcctatttaaaaagatccgtctgcagagtgcacaaaactttaaaaattattaaaaagtaataggggttatagttatagagtctaagcctgtgcctctctttgatttcgtttattaaactcagctaggacagtctgctgtcatccgactgagaccctgtctca

SEQ ID NO: 53516 - DNA, 230 bp, Mus musculus
  source 1..230: mol_type = other DNA
tgtcagtgcacaatgacagctccgggggatctgacagcctatttaaaaagatccgtctgcagagtgcacaaaactttaaaaattattaaaaagtaataggggttatagttatagagtctaagcctgtgcctctctttgatttcgtttattaaactcagctaggacagtctgctgtcatccgactgagaccctgtctcattgggcccctgagcccctgctgggggtcagga

SEQ ID NO: 53517 - DNA, 400 bp, Mus musculus
  source 1..400: mol_type = other DNA
ggaggccagagggggctgtcaggtcccctggaactggagttcaggcagcagcctttgcttataatcagttagccctggctggcctggaagaccaggctggcttcacctgggatttaattatacctggcaggcatctgctctgtaggctctgctctgcagaaactaaaacatcacaactgcagaatctcattctagctaataggatcatcttcctaccatttgttacaaagtatttatcattgacagatacattatcaactatgagatttctaattgtctttgtaagttgtaactagcacatgccaactctcttaaaagcccctgggaatcaaagggttagaagcagctgtttcttgaggcctgtttaccgtccagttaatcagtaagccagaatcaatga

SEQ ID NO: 53518 - DNA, 338 bp, Mus musculus
  source 1..338: mol_type = other DNA
tatattaatttgcccattcgagataccccatatgagtggaatcttgtcagaattccatcctttcttaaggatggacgccatataccatgtttcgttcaattacttgttgatggacacaaaaatgtaattatttcaatggtcttagaaacctatgaaataccaagcacagctttgtatccccacatctatataaagctgggtgtgggattgcttagcaacataataatgtgcgcatgcgtctgtgagcatgtgcacatacatcatatcatacagaaattatggatttctagcaaacaaactcaaccccattctgtttttttgggttttttttggggctt

SEQ ID NO: 53519 - DNA, 421 bp, Mus musculus
  source 1..421: mol_type = other DNA
cagaggacaacttgtggagtcagttctctgcaaatgaagtcctcaggagttcacaaactcctgagctatctcaccaggtccacgtggtatatggattcaatgccctcttgtgactgctgagggcactgacatgcatgcaggcctaacagccataaatgaagtcactgtcttcttgtcatacattttctctatcagcagaaaaatggaaaactcaagcgttctttcagaaagcaattctggcacaaaataaatattcaggccaagtctgaatggttaattccgagtgacccaccccaggagacttggtcctcgtctggcactgtgcgcgcacccggggccaattttgtcccgcccgcgcaccgtctcgcgagtcgcgggcgggggctgcgtcgcctgcgtccccgcgcagccgcagtaccgg

SEQ ID NO: 53520 - DNA, 436 bp, Mus musculus
  source 1..436: mol_type = other DNA
ttccaattccatgaaagatatgaaaataatagaaaataccactcactattagtgacccacaacatcgaattgcatgctgacgttgagaatcaagcttgtaatcccagtcttggaaatacgttctagtccaggctggactgtattgagatcctgtctcgataacccactcaaatggctaggtgggttggctttccctgtgcagcccaccactcagaagtatgcctctctggataatgaatcaacagggcggttaagagagatctattttaaataaaaacacgttgtatgaaaccttcaaagaactaattaaaaaatatgggcaagccgctcggcagcaccaatcccagggtgattccaggagctcggggcgggactctgcatgcggaagctagcggaagtgacgcagtctcgcgagacggaggactccgcaagcctc

SEQ ID NO: 53521 - DNA, 319 bp, Mus musculus
  source 1..319: mol_type = other DNA
caagactaagttaaacttagtcaaaaactctacacttaagattttggatgctcaggagcctgcatcctgaaaacggaagtttccttcaagagaggtcctttcaactaaacattaggggctagcttgcacttcacatgcctttaatccctctgagtttgaggccagcctggtctacaaagtgagttccaaatccctgaacaattctgggaggaggccacctctctccacaacccaagacaggccgtggctggccttaggcttcatgcttggactttgataaaaggcaagcggcggggcggggcacccgcggggcgcacgc

SEQ ID NO: 53522 - DNA, 286 bp, Mus musculus
  source 1..286: mol_type = other DNA
tacaacactctgggtggctcctgggggaggtggccccccacagagcatcccccagtggtcaaatggggggctcattggtcactgacatgtgacttagtaggtaagggaagaggcaggttccacccatacctttggcttctggcctggggttggagccccttcccaaaggttctagcttggacacaatatttgttgacaaagcatcattgccactgagataatggtatctgaggcatcccaactgaacccagggctgggcctaggccaaccacctttgcacaccttt

SEQ ID NO: 53523 - DNA, 535 bp, Mus musculus
  source 1..535: mol_type = other DNA
aatttgtttaatccctgaatgaaaatagtccccatgtatgaactaaacattgtgtacattaggtcttgttactgaattaatttaattctttttcagtgtgctaatattaaggtaacttaagactgaggtctgcacttcgctttcagataactcagtgagatacactgaatagaagctattctttcaatgtgttaaaaaaaatttaggggctagggagatgtctcagtcacccatatacctagactagtctaatccaacgaatgataccctatctcactcaataagattgggagcaatagaagaagattcctattctttccacaggaacctgcggttggaaagatcttaagagcgctagcagtctgtttctaaaacaaacaaaataagacacattttttttctattttaattcccagttacctttccttaaataaataaatataaataaataaataaataaataaataaataaataaataaataaataaactctacacgccccatagctaggtgatttctattggctgagtggtgt

SEQ ID NO: 53524 - DNA, 161 bp, Mus musculus
  source 1..161: mol_type = other DNA
gatgctgggtcccaagagctctcggactcagtttatgcctccaggaaaagattgaccagagaaagccagcctggaactctgcattcctctgacctctaagggaagggcacactgggagcctccttctccagtcaccaggggacagtcaacagttggagatt

SEQ ID NO: 53525 - DNA, 254 bp, Mus musculus
  source 1..254: mol_type = other DNA
gcttagagtggaagaacaggtcggcggttttcagatagcaaactgcaaactttcaactctcggagtgtgcacagtgaccatggtgacccagaccagtgtgaatagagctccgagttatttacagaggcgcctgttggggagggaggcccctctcccacgcgcctctggaaatgcaaagaccggtggagttgcaagttgctagattgggtcttctcttccagagaaagcgctgaagcgcccccgtggcagggtgg

SEQ ID NO: 53526 - DNA, 568 bp, Mus musculus
  source 1..568: mol_type = other DNA
cagtttggatggagctagatatatctatatatctatacacacacacacacacacacacacatctatatattttgatggatatatatatatatatatatacacacacacacatatatatatatatatatataattatatatttaacttataagtacactgtaactgtcttcccattgtgagccaccatgtgggaacagcagtcagtgctcttaaccactgagccatcttccaactttggatattattaaaagtatttttcctgggttgtcatgaagggtcagcaggtaaaagcacttgtgcgaactcatacaaatactaaaagtacatttaaaaactgctcatgttctctttatgtttgaaataaattaaactgcagcactgagatcctcttagagatggagtcacttagacaagatgtgtaggtcccagagtataaatggaactgcaatgcctttgagtctgaggaccgaggaggaagcactgagccccctctctgttctccttgctggctctcctgggcctggcttacgaccggaagagagtgtccagggctgctgtcttggccagg

SEQ ID NO: 53527 - DNA, 405 bp, Mus musculus
  source 1..405: mol_type = other DNA
cctgcctgcagcagatgttccgggggcaggaacatacctatgactgagcgtgggctcagacactcagccctgtgcgtgtgactgtgtgtgattctgctgaacatcctgggcagcctgctcttgtctcgagatctgggggtggaggccagtccacccccccttacccccaccacacctgatgagtggaaagagaaggtggtggacactgatgagctgtccccactgtgcaactgccccagtgtgacacatttgccaagcacctgtgttagtcctgggcttgtaccctctatgaagcttgagaactggaccccagattcctccagtcatggagggctgtctgccagcgagatagcagatttctggatgcaattcctctgctcagagcttgccagagtgctgagaatt

SEQ ID NO: 53528 - DNA, 226 bp, Mus musculus
  source 1..226: mol_type = other DNA
atctcaacgtgaggatctaaggctctggctcccagcagaggcggtccccggcagacggagcccaacagcagcaaccggatgcgggtcagagccctgggcgcacccggtggcaccaaattctctttggccaatgacaaggcagggggttggagcagcgcgccctgttgatgccttcagcatcccggcgccctttaccctttgctggcagccgataaaagggggctga

SEQ ID NO: 53529 - DNA, 282 bp, Mus musculus
  source 1..282: mol_type = other DNA
ctcctgtccctagccaggggaacctggcaccagcaccttccctttcaccaactttgaaacccatattttatgttcttcaaaatacattcccacagtactatgcctaaacaacatattttaggtagaaagtgtgtgtgtgtgtgtgtgtgtgtatacacgcgtgcacacacgaattttcacagtgttcggtaagctatttatgaaagagctgtccagaaactgactttccaaagttcccaattcccagtgattcggaggacaactttaattaagtagataatc

SEQ ID NO: 53530 - DNA, 225 bp, Mus musculus
  source 1..225: mol_type = other DNA
cctacttgcttcttagggatcgcaaagtgcctgtttatctcaacgtgaggatctaaggctctggctcccagcagaggcggtccccggcagacggagcccaacagcagcaaccggatgcgggtcagagccctgggcgcacccggtggcaccaaattctctttggccaatgacaaggcagggggttggagcagcgcgccctgttgatgccttcagcatcccggcgcc

SEQ ID NO: 53531 - DNA, 208 bp, Mus musculus
  source 1..208: mol_type = other DNA
tcagtcaggagagccagggttgccactagtgcattttcagtaattccctgttaaccgcagaattaattggtattccacaatttacatgtcatgtgcctgtagtatagatcacactgagagctttaataactacataataaattgaattagtgttttccctttctatacacaggagcctgactcaattgccagggcaaattgacttttg

SEQ ID NO: 53532 - DNA, 334 bp, Mus musculus
  source 1..334: mol_type = other DNA
cacatgcatgtggagtgcaaacacacatgtgggcaaaacacccatacatataattttcttcttaaaaaagaatatgctatgttctatataaacaatataaaaaaaaaacacattgcttttaagcaacatgagatcagggtttgctattagttaaatgcagatgctgtcaaattaattctgatgatgtctaatgatacttccccaaatctatatgttgaatagtacacgctattacagtaattgtgtctaaaaaacatgtggcgagccgcctcctggcgcagccccgaaagggcctcaggtaacttgcaatatcaagtaaagcccgcccagcttg

SEQ ID NO: 53533 - DNA, 400 bp, Mus musculus
  source 1..400: mol_type = other DNA
ggatgacaatcttggcctcctgtagagatctgacgctgtcttctggtgcatctgaagtcagctacagtgtacttatgtataatattaaataaatcttttaaaaaaaaagaatagtctagtaagcaaacaaaacaattaataccttctcttataaccagtatgtattgttggaagtgctatatgcagaaaaatcaaataatactgaacaaaaatggattttatattacttttttttttttttatctttggagtctctagattctgaatgaattcagtttgtccttaatcatctgtctaagccttcaggacagctttaagcgttggcttctctccccacccgagagagtaaagcttaaagcttaattacacttgcctcctaggcttgaacatagggatttca

SEQ ID NO: 53534 - DNA, 118 bp, Mus musculus
  source 1..118: mol_type = other DNA
aattattattaatgataaaagctcaaacatcacatcagtaatttctgagtgagttttgcccctgcagccccccaggtttggtgctggggcgtcagggttttcagagaagagacacagc

SEQ ID NO: 53535 - DNA, 636 bp, Mus musculus
  source 1..636: mol_type = other DNA
cccgggccctcccctcgccagcaccggagtgacaggcgcggggccctccttgccgaagctcggggctccggcgctggcgcaagtcatccatctcccggcgcggggaggaggagcaccgggagcccaggctccagtctccggccgagtctgccgcaacccacctggggccagcccagcgctgcgggcgccgctcggctcctaggctgctcgccgcggcgtgcgcctgccttttccgggggcgggggccggctcgcacgctcccctcccgcgggcgcccgcttggacatcccgggtcgccggcacttggagcggcccggctcccctcctggcgccctcgggccgcccccgccctgagctttcagagcctctcggacaaccgggttccaggggagctgagtgagcctccctacccggcctcagctctggccgcagctggcgcgcgagccatgcgccccaagtgccccttggtccagccagtcgccccggggctgcgttgctgactgcccagccgcgtgccccaacggtggcaagttgcagcctctgcggtcgcaaaccccagcgggcccggaggagtcccggcgtggagcgcggcgcggcgtcccccgccctcgcttgccccccagcagtcgggcgccc

SEQ ID NO: 53536 - DNA, 500 bp, Mus musculus
  source 1..500: mol_type = other DNA
cagcctgaggacacggttcccgcggtggccccgacgtggctgcgtgcttgggaccaaaggaacgctacgctgtccctcgagtccgacccttgcgtcccagtgccaccgtctggggcggggcgcagacaatggggcaggatttcccccctagggtcttccagcgaagcctcccgactcccgggcgtccgaagtgggctgcccctgggtgggccacgctgattgtgtgtcacagaaacggcgcgcgggccagaggcgggcgggcttccggacggcgccgcggtccaggcaggcggggaggggcgacgggcggggctggggcctgagggtcccacccgcggctccacctgtccggacggtggccgagaggcagcgcgtcgcttcggtcctccctccctctggggtgggcggtcagacggggacgatggaggccgaagctgtctgcctgaagcttggtcataggcagcggcagcagcggcaggggcggagccccggggggcggc

SEQ ID NO: 53537 - DNA, 393 bp, Mus musculus
  source 1..393: mol_type = other DNA
atacacatgggaagtgaagttttaaattactctgcaaagcacaagtcctttactgataaggaaaagaagtctttgtgtctaattcaatttttggcctaagatgccaaagtgactatgaaatattagggcagctgtagcacaatcgtcacaaatgttggctcaggcggctgtcgccagctgtcgtaacacccgacgcaccggccaaggccgccgcggccccgacgaggaggcgcgcgccccaggcgcacgtgacgggcccggggagggcagttttcaatctcccctcccccttccaaaaaacccgccctctcccggcaggcggaggctttctattgcgcccagagtgaccctccggcacctcaagaaaggcccgccccctgatggtcctcaggt

SEQ ID NO: 53538 - DNA, 249 bp, Mus musculus
  source 1..249: mol_type = other DNA
gctctaaagcacagaatttttggatacctgggaacgcataaagagcattctcaaacatgttttgcaacaagactccgggacccgggggttacgcgtcgaccaaagcagatccgtaggaccagcctcacgcggtggtagccccccccccaccagggggcgggcgatactcagactgcctcgagcatctcctggtgggggtcgcaaaggagggcgggcacccttccccgcccccgcctctggcccgcccgg

SEQ ID NO: 53539 - DNA, 191 bp, Mus musculus
  source 1..191: mol_type = other DNA
gtctgaggacaccacaaagggacttggtgctcgaaggcagagggcctggcgccaagcttctgggcaggcccctcctacccactaatggagtgggacgccactactgcaaaaagacaaggcactggcgctccgagcccccagcgctcacaggcgctcgcacgcgctactcgcgaaccggaagtcaccggtta

SEQ ID NO: 53540 - DNA, 388 bp, Mus musculus
  source 1..388: mol_type = other DNA
cacatactcaaagtggcttgaagcaaatcacctgggatgagtcgtgtcaccctcagagacctcctggaaaggtctggcctagcagggtcagattagatctgcagccctgctttcagacttacagaccaagtgggcctggcggaggaaaggagcctttggtacgtccctgaaataccacctgggttgctaactactctagggaaagaggcggtactaggtctgccaggacagcccccagccagccccagccctggactggttccccacagaggagagaggcaatctctaccgtgccttagttaaggctgccaggtagcggggcagaccactcccctctgggggggggcgcggcttcagccgccccgccccactcttccagggctggcct

SEQ ID NO: 53541 - DNA, 544 bp, Mus musculus
  source 1..544: mol_type = other DNA
ggaggctggagccatgccagggacaagcctgggctcgcggcccgagggccaccaggtggcgccgatttggaaaatccaacctccagcctgctgggggtgggacagacagcgaccgagccagtccctcaacttgtgcccaggagccggcaactggagagggatggctgaccccctcggcctccccatggaccgggaagctggagggagggggaggggcggggctggcgccgcgccttggctctttgacaatgaccagctgccgctggcccttgggctccgggtgacccggctcgatgagtctcgagccggccgagccgtcgctaggccactctgggaggaatcccggccactctgggaggaatcccgagcgccgccgagcagcccccgcgtgcgccctggctggcacgcgtgacgtgggttacttgcgcgtgtccgctccccggggcgggaacgcccctcggacccctccccccatcagtgcgcaccgcccactcgggccgggcgggggccggtcagggccgggggcgccggctgggcggaggcg

SEQ ID NO: 53542 - DNA, 426 bp, Mus musculus
  source 1..426: mol_type = other DNA
aggaaaaggttcttctcccggctggtaggctccacccacctactcggcagaatcccggagttctctgggccgcagcccgtgggcggatgcggatcacatccaagccggactgacagccccattaactgcagcgggcaagccgggatcccgcgccgcccacccccgccccggccactattcgtggcatggcgcacgggcgcgggttcacgtatactacgacctcgcgttccacgaactccgagtggtggcccgctcccgcttccgcgtgcctcacctggcgccgcgggacgagggcgcatcccggctgaggctgaggctgaggcgctgcagctgctgcacgtaacgccctaggcggctcgaagtcccgcgaccggtcatggctacggttacgcggagccgggcgggactaaccggtgacttccggtt

SEQ ID NO: 53543 - DNA, 292 bp, Mus musculus
  source 1..292: mol_type = other DNA
cgcagctgctggaatagagctaccctgcgcggtcctgggatcccattggctgctgagaccgccacccaggctctggaactggctgggttccactggctactagaatctactaggagaagaatctttctgatgcgcctgcttggatgcaggcagagatcacgggaaactttggccgtgcacatccctgggcgttgcaccctcagaggccgctcacccgcacccagtgcacctagactgggtgctgcgggggtgggtgcgaaggaggcaagtggggcggctcctccccttttct

SEQ ID NO: 53544 - DNA, 293 bp, Mus musculus
  source 1..293: mol_type = other DNA
tactaggagaagaatctttctgatgcgcctgcttggatgcaggcagagatcacgggaaactttggccgtgcacatccctgggcgttgcaccctcagaggccgctcacccgcacccagtgcacctagactgggtgctgcgggggtgggtgcgaaggaggcaagtggggcggctcctccccttttctccctggttgggaaggaggccagaattcccggggggtgggtcaggcgaacgagctcagggagcccccgcccttccctgctgctcagcgtcacgcgtgacgtctcggtga

SEQ ID NO: 53545 - DNA, 283 bp, Mus musculus
  source 1..283: mol_type = other DNA
ggggcggggcctgccattctcggggtggtgggcgggcctccggggatgcctgcccctaacccaaaagtgccaccgtggcgttggcggcgccctatggggagtcacccgccggccttgctgcggccgctagtgtctgcgccccagtggaggctggccccgagcctgggaagtcaattttacattgagtaaaagagacaggacctgaggctcagccaacagtttgagggctgccagcgatcccctgacagaagcaggggtggcctgcgggtctggctggccgtgc

SEQ ID NO: 53546 - DNA, 353 bp, Mus musculus
  source 1..353: mol_type = other DNA
cctttctaaaatattattattgggtcagagagtaagaacgttttcaaagtatagacagtatgcattgtcacgagtcgcagctgctgcaaacccaccagagggcgctcgtgactgcatctttcagaaccagggagtctttcacttttaaagcacaaatgcttcccaagaacttccttagcctcacagttcctcatttagacctggacagctcccacgttgggattctcgcgacaatcccgaaacctcgcgtgatctgatcagaggcagcgtctctgctgactgaacgctcctttgaggagggctcggccaaagtcagaactgcgcggtgactgcagtgcttcttcctcgcaggg

SEQ ID NO: 53547 - DNA, 405 bp, Mus musculus
  source 1..405: mol_type = other DNA
atttgtcctggaggctattctaaaagcaaggaactaagtcctttcagagccattcacttgggtcgggtcgtaggagcttggtaccttgaggagcacaagccccaaagtaatcctttggcttgtgactgtccttaaattctctaaagaggctaatttttataacaatatatagccagctcttcatagcctgcctcggggcccgggctccatacctggggagtagacagtcttctactttctaacaagctggacttgaagttgcagtaaatctcctggttgagtgacagtccccttggggagattctccagttgggcaggacacctgtccccaggggcctagtgggctggactccttcggacccggccgaaacagctaggctcgctcgctcagggctttttcgcccg

SEQ ID NO: 53548 - DNA, 475 bp, Mus musculus
  source 1..475: mol_type = other DNA
tttctctgtatagccctggctgtcctggaacttactctgtagaccaggctggcctttgggattagaggcgtgcgccaacttgcttgatagtcattgaatttcatttatgtaacacgcttggggagagaaaaggctcttctgaaaaaaaagaggcaataatagcttaggatgttatcggaatcttgcattgatgttgaggctgctgttacatgcacacttggctcaagtaatctttctgcagatgccagatgtatgattagggagaaccaaggaccctgagttctctattttcctagtatttggaatacagaggaataacaagagccacgcacagccgcgactctacgcagtgacccgtgggaaggcagcggagtgcgcacgcgcagagccgcggtcctcctcgggccccctgccagtgccaggaggtacgggatccggacgctgcgttggctgcggcctggcacgaaaggggcgg

SEQ ID NO: 53549 - DNA, 339 bp, Mus musculus
  source 1..339: mol_type = other DNA
tgaaagagcagtcaccgctcttaaccgctgttgaacatcttaataatagcattgtcaatgagaagacacttaggtgatctctgcgtagaggagcctgacgcatattaggcactatatgaggcagattcaatactattatttctgtcatttttcatataaggaaactgatttcaaagagattaaataacttgctcaaagttactctgctacaaggaatctgaggtcaaactcaggcatccttactcagagaccctcatcagaggccagaggaggactattagtgttcttcaccaccttcagaatctagagcctgccattttttagccaggctgaactgga

SEQ ID NO: 53550 - DNA, 593 bp, Mus musculus
  source 1..593: mol_type = other DNA
attcgcttggcaaatgtatcttagtttaagtcctggcagtcctggaactcagaggtctgcctgcctcccagagtgctggacccagctgtttttgttttttaaaccatgaaatatatgtatgaaaatattttttaaaggaatattagttctagtttgaaattttaagctgcattgtcatgttcaggtgaataaaataattttaaaacttcacaatctaaatgggtaaggaataaagtatggtttgatttttcaattaagtctttagagcccagaaacttagttttgtgttgtagaacatgttaagttaattaaaaattcttatatatacttagagtcattgctaagttgatgttcaaatctttgattaagaagacacaacagacagctgtcatctctcctcttcagaaaatagagataactgttttagctgttttgtttttctcttatatctatgctttaatgataaaatactattgtcttgattatgatgcttgttgacttgaaagtgaacaaaagcaacattggcgcctcttctttatcagagcatctcagtgctgagctgagcttgtttatcttagaagagcagtaagctg

SEQ ID NO: 53551 - DNA, 385 bp, Mus musculus
  source 1..385: mol_type = other DNA
ctggtgtgtctgaagacagctacagtgtacttacatataataaaaaaataaataaatctttaaaataaaagcccacccacttcattttataattgaagaaaatggggtcttagatcccagatgacgaattatacctgattatctgcaaaacctgggtttggtctaaaaccgcctcttggtacagccctgagggacgaccaaagacttgggtcaaaagcaggaagctggcatggctgtaggctgctgcgacaggtccagctctgcccacccaggctgaggccctccctgggggagcgggcgcatagagcccgccctggggggaaccaggaacgcgccgggccactgccatggcaactgatgatcacttccggatgacccgggaagt

SEQ ID NO: 53552 - DNA, 452 bp, Mus musculus
  source 1..452: mol_type = other DNA
cttgggaaaggccttcacgatgccctgagggtccattgaagggcgctggatcctggcctttctgttaaaggattgagagccagcccttaattctcagaggtctcggaaaccccagttaaacttaagtgatttaatcagcctctgcgtccccttccaagagacttttccaaaatgatgacgggtttgggaaccgttcacccctaagggacatgtcacagggaaagttgtgggcacgctgcgcacctgtccctgtcgcagcagccccatcgcgcgggtctgagccccgcagctgcagggaggtggagtgcagccgcagcagatgtagtgccacatccactgtgagcagctggtgtgaaccagggactcccagctggggccagaaggagttggtgctggatccctaaaagttctgggagcatccccacttcccgggtcatccggaagtgatcatc

SEQ ID NO: 53553 - DNA, 431 bp, Mus musculus
  source 1..431: mol_type = other DNA
aaaaggcttacagaagtctctacattgctcagaagcagtggctgtgggtccttcagagacccctgaggcaaggggcatttctccctcccagagcctctttggaactgtgagacagaaaaccagcggggttggcaccgggttccagtggcgcccaaggggacgctcagcaccggggcccagttcactgttagctgcaggctcccaagaggggcgcgtgcgaccgtcccgcccccggaaggcaagggtagtgggaggcgcccacaccagccgcccccgcccctcccgcgggtgcccgccgccccgcccccggccgccccgcccccgccccgggcggcgacccggccccagcgcccagccgggggtgcgggctccggccgcccgccccgcgctcccccctcgcggccggtgcggcgccccccgcccctgctccc

SEQ ID NO: 53554 - DNA, 410 bp, Mus musculus
  source 1..410: mol_type = other DNA
tacggaatcaggaattgaacaagttgctttttgtttaatgttggctttcaataatcacatgggatgatcttctggacataagtgaaaacaccatggttatgaatatttattaatgttggaataacatttcattgtttgatcagttcctatagaaaacgacttgaagtgtgtaggctggattgaagacagccctgccctcctgccttccacagcaaagatttttctcagaaaagtacatttgtttttgtttttaagtaagttgctctgtttactacaggtaaacactggaacatggcttcatttccttagataaaggaatttcccgtaccccaaaggtttacactaacatctgtatgtatatatccccgtcctcgtggaagaggcgacgactgctcctccctgctaggcgg

SEQ ID NO: 53555 - DNA, 488 bp, Mus musculus
  source 1..488: mol_type = other DNA
ccatgggctggcaagacaacctgaggttggccacagatctcctgattgtcgtgatcccgctagtcccagtggcaccggatgcgagaggggcgacaggcggagtgtcggctagccccccgcatctcatcctcctcctcaaccttgaaagtgaaggagcgggtgtacacgcgtggaggggacagcgcgcgaggacgctcctccgctgtcccctccacccggccatgtgccgcggcggcggggggggaaccggccgcttgctcgcccagaacacgtggacgggcatcccgagcgagcgaggagccctcggcccacagctgcgcccggccacagcggcgcccggccgccttcctcggcctgtgaccggggccgggaccctcaggcccccgacgcccccagctcgggctcggctctcttggttcaagaacgctaaagcagccgccgcgccggccgccatgctgaaacggccgtgagcgccccgccccccgcct

SEQ ID NO: 53556 - DNA, 462 bp, Mus musculus
  source 1..462: mol_type = other DNA
taacagcaggttttaaccatattatgaggtcataatggtcccgtctcctaccacttgttcccctcctccgggtggggtaatggtccgacccagagtgtggcgctcatcccggagggtggcgagccaaaatggtacgtcccaccgccgcacacctccgcggtgcccctagcaaataaagcgcaactggggaccggtctgagccggtctgtagcgcaggcgcagcagcggcaggagctgcttagggactcccggagacgccgggctgtccggagggcggcgggcgtggaggacgagcgaaggcgcctcctcggtcctccttccgtggagacgcggcggctgcctcgccctccgcttaggctcccggctcccagcgcggggcgaggcagcggctgacaaagggctcgagccggtgccgccgcccttctcatccgggcactccgggcccccgccgagaggaagggg

SEQ ID NO: 53557 - DNA, 255 bp, Mus musculus
  source 1..255: mol_type = other DNA
ggctggcctggaacttgctcccaagcgctgtgcaggcagggtttccttgtcctaacagcaggttttaaccatattatgaggtcataatggtcccgtctcctaccacttgttcccctcctccgggtggggtaatggtccgacccagagtgtggcgctcatcccggagggtggcgagccaaaatggtacgtcccaccgccgcacacctccgcggtgcccctagcaaataaagcgcaactggggaccggtctgagccg

SEQ ID NO: 53558 - DNA, 347 bp, Mus musculus
  source 1..347: mol_type = other DNA
tttgtaggtgctagaagttgagttttttttttttaagaaagggaactctaaggttcgctaagctatgtggagagttgccatgacaactatgtcctctcaccccgccatgaatttgaggccagcctgaatcatgtcgcaagtgtccttaccagaaatcctgaagacgtttggagagaaagtggtgaggagcgaacgccctgccctgccctgccctgcccctccgccacacccccatctctaagagctttgcgggtgggtgcagactgcatctgaaaggctcagggtctgagacactccgcctgtcagtccccactctaatgggggcggcaccgccctcagtcagaaac

SEQ ID NO: 53559 - DNA, 420 bp, Mus musculus
  source 1..420: mol_type = other DNA
agagacaggcctccttaaggcagctgcctgtcccagcctcatacaggaacaactgactcaagtattactgaaaagactcaatgtgttgaggtactttaggtgcagggctgttcctcacttcagaaaatgagggagacatctcgtagaaaggggcaaaaaaaaagttgacttctttcttttgccttcccagttgcctggggaggggggtggagcccgtgtccagagaagggtggctgctgattaggaaccagacataccccaggctctggcccagctgtgcaggactggcttctcgaagccccgcaattgtgggtggtgtagatcacccggtgcctcctccgagctgcagagggtggggggcgggggtagggggagccaatcccggcagcgcctaaggcggggaggagaggcggctgggct

SEQ ID NO: 53560 - DNA, 100 bp, Mus musculus
  source 1..100: mol_type = other DNA
tgtgtgtgcctggtgcccatagaggccgcttggtctacagagcaagtttcagctttttctcgaaaagacaaggtttcttgttggctgaacccgcttcagc

SEQ ID NO: 53561 - DNA, 425 bp, Mus musculus
  source 1..425: mol_type = other DNA
tggcgtatgcccataatattgcacgcacacacacacacattcaatataatttaatttaaatttttaatgaggaagataatatatatatgtgtatcctcaatgcttggtattgtggttcgagtctataatcccagcgtgggagaggaggatctcccgagctcattggctggctagcacaacctagtgggtgagaggtcctagtgaaagaagttctctcaaaacgctgacctcctcatgaaattcattactttgtatgctgacttcaaatttaaaacatatgtataaagaccagggatggtagtgatgaactttaatcacctctgctgcggatgccccgcagctccgcccccggcgcgcagcgctagcggggcgtgccctggggcaatcccggacctcgcctggcggggcggggccgggcggagtcg

SEQ ID NO: 53562 - DNA, 201 bp, Mus musculus
  source 1..201: mol_type = other DNA
gggcctagacttctaccgaagtttcagaagtatctcctcccctaggaagagagatcgggcctagtatttacaagatgaactcaaaatgtgggtgccctccgcccgctcttcctcctcgctcgcggggagggggcggggccggcagggcagctccaccctccgcccgccctggggcctccttcggagagaggctcggagagc

SEQ ID NO: 53563 - DNA, 391 bp, Mus musculus
  source 1..391: mol_type = other DNA
cctccaaaacagggagctgcttcgcggacctcaggcccttaggggagagtgctccttttcttcgggtggagcgcgccacacgcaggggtcagcgccccatccctcccgggggtggagagagggtacacctcactacccacccaccaaccccgcgcacccggaggacggacgccgagcgtgaggcttcgcctcctcccgctccccggcgcccgccctcgccgggtgccgttcccgggagcgctccctgcccctcgccgcgcggcgcacgcacgtcgccgctcgcgccgcgctcgcccgggtccggcccagcccgactctggccggagagccggcgcttgcgagcgagcgcgaggcggggacgcacacccgcgcgtacacacgcagaggcagc

SEQ ID NO: 53564 - DNA, 317 bp, Mus musculus
  source 1..317: mol_type = other DNA
gaacaagtaatcgcaattactgagcattctcttcgtaataataagtgttgctttaaaaaactgaaaataagctttcctacattaaatatgacttgaaggctattttgaggttagaagagaaacaaagggaaggagaacactttttgtttggtctgcagaccaggctgtcctggaactcagagatctgccaacctagtttttttatagaaacatttgcactagtgctgcagtaatttaacaaaaaataaagtgatattttccttactactgcgtactcagcagcttggtcaaaagctcgagggaggacaatcggctgg

SEQ ID NO: 53565 - DNA, 383 bp, Mus musculus
  source 1..383: mol_type = other DNA
gggatggaagagttcttcccttccatggctccccgcggcctctgcccctatgggtagggggcactgaaggtgttctccacctccaaaacagggagctgcttccagcggacctcaggcccttaggggagagtgctccttttcttcgggtggagcgcgccacacgcaggggtcagcgccccatccctcccgggggtggagagagggtacacctcactacccacccaccaaccccgcgcacccggaggacggacgccgagcgtgaggcttcgcctcctcccgctccccggcgcccgccctcgccgggtgccgttcccgggagcgctccctgcccctcgccgcgcggcgcacgcacgtcgccgctcgcgccgcgctcgcccgggtcc

SEQ ID NO: 53566 - DNA, 390 bp, Mus musculus
  source 1..390: mol_type = other DNA
cctgcctgcccagggaaatcatggagtcattgacacccaaggaacctctgcagaggtgaactctcagggcagttcacagaaacagccccaggaagagcttcagagagaggctgctgcccttcagagcagagggaagccacgggcttgggctcgggcctgggcagctgccttacggggttctctcccagtaggcccaaacctgactagcccagtcctggctgacaagaaaggaattgaacctgcagtggctattcccacttcggaagcaaacacagtggcagctgaccctgttccaaatgaccctgctccagcaactgatcctaggcgtgctgcagcagcagcagcagcagcagctcaggggacgcagaccatcctaaggtcgtcagccct

SEQ ID NO: 53567 - DNA, 98 bp, Mus musculus
  source 1..98: mol_type = other DNA
ggcttctcctgcacctgaggacaaggagcccaagttccggaaactataaagaaactgtaacagccagcctgggtttcccaaggatccctgagactgat

SEQ ID NO: 53568 - DNA, 291 bp, Mus musculus
  source 1..291: mol_type = other DNA
accaaatctgttgtcgtgggaattctccaagttatcttctttaggggagaaaaaaaaaaaggtctttaaaaaagaaagcctttcggagctgagacccgacagccgggttctctgtcccgcctgacggtcctgcagccgtctcccccggcactgcttctcgtgactccggggagagagtcccagctggagcgcagtccgggccacggctgccgggtggcaggacccctcccactaggaaaggggcgggcctggggcgcgcggcatgctgcggcgggctgggggcgccctggg

SEQ ID NO: 53569 - DNA, 529 bp, Mus musculus
  source 1..529: mol_type = other DNA
ctaagttcgaggccagcctggtctacaaagttagttccaggacagccagggctatagcctttctgtctacaaacgattgtgtatgcatgggtccttttagaaggagctgcatctttattgcttccgtagctgatactgaagttttccgaattcactgtgacttctttctttaggaagaaaggatttttatgggaaggatatgtaacctagctatgactgacagacaatgtggggtaccaacaccttgtcaccacaactattcagtactgtgaggtctggaatttgcaagttttcccgcctcggacaggagcgtggcatctgacgtagaagctccgcctccttagtgggcggctcgtgggctccgccccctgcaggatgatgacgcgtgtgggaccggaagcaacttctagatttagtctgggtctctcctcccgggtggagggtacgcgacctcgtgtgcgccactcttttccgctgcgcgccgcgcgcgacttgatgacgacactggacccgccctcgacccgggctg

SEQ ID NO: 53570 - DNA, 291 bp, Mus musculus
  source 1..291: mol_type = other DNA
ggtgtgagattaggccctcagacttcgttcattaagatttgtccaaggcttaatagcattatcttaaaatagacaaattctttctttttaaaaagaagtattaagcaccgaattggctgggtcccgtctggaaaatgaggatactctaattaggtatccaagatttctgctaccattttctcgtttcccttcctgcccaggatgcccagcagcctgtcagtcagagaatccacttttcagagtgccacgctctgattggctgagcgcggcaggactctcgcagttaccagg

SEQ ID NO: 53571 - DNA, 358 bp, Mus musculus
  source 1..358: mol_type = other DNA
gaatcttcctgcaatttgtttctccttgcggctccagaaaggccgctagatggcgatctggagctgaccgcagctaggaggtccctctctgggaggtcctgtgtctcagagatagccaacctctgggcacagcaagagccaagtggcccactggactccgtaacggtcccgggcaagcctggaagagtgcagagatctgagccgcgccctgcgctgggtccgcgcccgcctcgctggtccctagcagaactggagctgggtgacaccccgcggccagtcctgggcgagccttccccgaaaggggcgcgcctgccgtcacgggaattccccccctcggggggccgaaaggggctttccc

SEQ ID NO: 53572 - DNA, 336 bp, Mus musculus
  source 1..336: mol_type = other DNA
tgtaaaaactcacccttttaataatcttactattaactttctaaatgttctttttaaaaaatattaatcttttagagctaaatcctaaaccttttacagataaaaaggttgtgtcaggaacttaacagacaaaaatgaccttttgccaggattaatttttgttagaactctcagagattgagccaaatgtattccttcgtcataggcattgcctgggactctagtttccaccacactttttgaaaactacctttatttatttatatgcaaaggaacaagcatgtttctaaaattacttgacagctgctgattttaagaaaactatgtagagacgtc

SEQ ID NO: 53573 - DNA, 188 bp, Mus musculus
  source 1..188: mol_type = other DNA
tggtatgtactaggtgctcaagcctgctcagtgcaggccactagccgaattgtagggacccaacattcctatctacatgattgcgtgcagaacccagaaatcctggttttcccagaattccttctacactacctcattactgaattgtagctgatgtgggcgcgcaccacctccgggcgcgcgcctcc

SEQ ID NO: 53574 - DNA, 591 bp, Mus musculus
  source 1..591: mol_type = other DNA
gagccctttggctggagaccaccacggtgagtggccgggttcagatccctgggctggggctggacgccacctccagtgagcgcgcacaggtagcttgcctgtgcacagccggccggtgtgagccccgcacacgcactcacagcgcacccgtgcaccggcgcctgcgcacggacatccagacgtgcacggacgtgtgcccacactgggcagtacaaggactcacctgtgtggatgaacgttcacttgcacgtgccatgaacggacacatggctcccgtttgaccggccaccgggagcaggtgcacgtggagggggaaactcctcccccccacacttctctggtcagagccccggaggccccactggaagaacccccgcctacgggccattcggaaaaggggcctccctgggtgaatcagccgtgtcctccacgctggctgatcccaaccaggctgcggagagggggcgaggcggctaggccccgactgagccccaggggctacagaggctgcccgggaaccaggaaccgcctgggcctcccgcccctcccgctgcgggggcgtggccccggcgtcatttccaggcccgcccc

SEQ ID NO: 53575 - DNA, 182 bp, Mus musculus
  source 1..182: mol_type = other DNA
tggtgcgcgcccgctacaattcagtaatgaggtagtgtagaaggaattctgggaaaaccaggatttctgggttctgcacgcaatcatgtagataggaatgttgggtccctacaattcggctagtggcctgcactgagcaggcttgagcacctagtacataccaggtaacctaggagtcctgg

SEQ ID NO: 53576 - DNA, 235 bp, Mus musculus
  source 1..235: mol_type = other DNA
gaaactgtttcagtccctaggaagctggcagtaacagctcctgggtccctggcgcagaaccgaggctcctccttacagactgggttttagttcaaaagaaggcatgcttcttacttactctctgccagcgcaggcaaagaccctggaataaggctttttcagaaataatgccgaaaggtttgggacctctagcggacaaatatgggcaaagcgcccttctcaaagctgggccccg

SEQ ID NO: 53577 - DNA, 297 bp, Mus musculus
  source 1..297: mol_type = other DNA
attcactctgtattcagcacaggctagccttctatgtagcaaaaggcacaatcaggcattacttccttcgtcttctaattcttattactaccactacaaagaagtcgtgctaaattctcatcttctgaaattaggatcggggaaacttgctttgagctgaaatgaggaatccaggcaacctgcccctgttgcctgatgcccgttttcttttgggtccctaagggaaatagcccatgcagcgacagcctcaggcgcggtcacctgcccgagctgctatcgggagagccgtgcggagcc

SEQ ID NO: 53578 - DNA, 495 bp, Mus musculus
  source 1..495: mol_type = other DNA
tcccttcgaaggggtttccagtacactcttaaattttggagtctgaagtacttgtgagtagacatatcccagcagcaccgggagtggtgctggaagccttttaaaatatcatctaaaggtttagaaattgttttattatttttcttgaccttgatggatgacaacatccagagaaagaataggtaaattttttttaaaacagccaggcatttgtcaatagttccaagaaatattagagttgtaacattaataataatgacatactgtctaatgaattagttgtcaagcttatcttaaaattgtgtattagtaaaacaatattaagcgcttcttagtagtccctggcgcctcaaggtaccaagtctctgggttcctcctaacactagggggaggccaagatccttgggacgctcccaacccgggcagggagtattgtcaagtcacgccttccccacttgtgactggcaagctgacgccccgccccttggagctccc

SEQ ID NO: 53579 - DNA, 414 bp, Mus musculus
  source 1..414: mol_type = other DNA
tggtaccttgaggcgccagggactactaagaagcgcttaatattgttttactaatacacaattttaagataagcttgacaactaattcattagacagtatgtcattattattaatgttacaactctaatatttcttggaactattgacaaatgcctggctgttttaaaaaaaatttacctattctttctctggatgttgtcatccatcaaggtcaagaaaaataataaaacaatttctaaacctttagatgatattttaaaaggcttccagcaccactcccggtgctgctgggatatgtctactcacaagtacttcagactccaaaatttaagagtgtactggaaaccccttcgaagggaatccgatcgggctgggacccggtttggagcggctccctggatgcccagtaccgg

SEQ ID NO: 53580 - DNA, 521 bp, Mus musculus
  source 1..521: mol_type = other DNA
gccgcagcggagaccctgcccggagtgcccgccctcccctcacttacagagcgacgggcgcgggcccgccccggacgcgtctcccgggcagcgctgggggcagcaggcgctcgtcgtttttaatctttttaaaagatttttttttgtagagagaaatcaagacttggcatttttctccttctctctctacaggaccctcaagcgcgcgcccggacccccagtccccaccgcggccgctgggagctcaagatggctgggcgctgaggacgcacccggcccggctggctcggcctggccccgccgccgccgccgcaggctggctccgaccgcagcccggagccttccaggccggagcagccgggagccgagcctcctcctcagcgcaggcgaggcgcccgcccagtgcggggacagggagtggggtctctccgcggcgggggcgccctgcgcggggcctccagggagcgcagaagtagcgacgagggggtcaggccggagcacctcccgggcttctccctccc

SEQ ID NO: 53581 - DNA, 433 bp, Mus musculus
  source 1..433: mol_type = other DNA
aaatagtttacaagtaaaaaaaaaaaatagtttacaagttagttcaagtctcttaataatgcaatttccacgaaggcaggttgtcgggaaccaacatgccggggtcagaagggaagaatccattggagccctggtgggtccctccggccacgcggcttctgcagatgcaagtccagcacgcagcgcctggcagccgccacgctcccttcggaggcgcggggctggtcccagagggatgcaccccgcgactgccaccaggctccggccagccacgtgggcggctttgcacctcccgctgggtcgctcaccagcccgctcccgcccctcccgagaccgcctgcgcaatgggcgggcgctttggcgcgcttgcgcaagaggagcagaaccccgccccatcccgctgctccgttcctccgctgtgcgtgcgagggac

SEQ ID NO: 53582 - DNA, 451 bp, Mus musculus
  source 1..451: mol_type = other DNA
ccattatttcttcgcagaaacacctctcactcagagacgcgagcatctaggaaagccaggttacagctccctggtgctgccagggtgatctcaaagaaccgagaggtcgactctgcagtaagatctgagagcttggtctgatctccgccttcattttaggggctcctccgcagcgccccgccctgggactgggggggggtgactggtcagctctggaggggccagggcccccacacccgttaccaggggtaactgctgcggcgccgcccctgacgtccctcgcacgcacagcggaggaacggagcagcgggatggggcggggttctgctcctcttgcgcaagcgcgccaaagcgcccgcccattgcgcaggcggtctcgggaggggcgggagcgggctggtgagcgacccagcgggaggtgcaaagccgcccacgtggctggccggagcct

SEQ ID NO: 53583 - DNA, 264 bp, Mus musculus
  source 1..264: mol_type = other DNA
ggagtgctcccaagggtgctcctcaggacgatcgggacactgacccccgatcaggacactgacgctggttgtctctgagacccaaacttacacacccagtttgtttatgaaacaacaagctgggagagatgtctctccgggccccctctaaactttctttcctgaggagaagcaataccttgggaactagtcctcaggccaggaccgggtcagagcagggggagcgagcaggccccgctctaggctggtgctggagcaggcggt

SEQ ID NO: 53584 - DNA, 292 bp, Mus musculus
  source 1..292: mol_type = other DNA
ggcccataccagggtctgaactcagggccttgcccactcaaattgaagcagcaggcttcctgtaatttaatacaaaacttttacctctacttattttaatacaaaaagcaccaaaccacttaactgtgggaacataatcaaaatgactgaaatactgtaaaccttttcaatgccactctctgcggggcggggcgctctgcactttcacagttcttttgaccaatggacagatgaggcgcgggagctggagaccctcccctgcatctgggcgggccctttgcctggggcgggg

SEQ ID NO: 53585 - DNA, 386 bp, Mus musculus
  source 1..386: mol_type = other DNA
tcaaatgtaataaatttttaaaatgacaattaaaatgttactctgtaatttttgtgtttaagatactagttagatattttatatgatttttaactagtgttttattattttaacctgcatgtatgtatgcgaagagcaacgaggcatctagttaaagtattttaaatgatgcattttacgttttatacatagtaacatgacaaaatcatttatttccagaaaatattaaatagcccattcataataagtgacattaattattaactgtgcagcacttttgacattacagccccagggagatgaccaactctctgctctttagccagctcctcctccaggagttcgtccttaatcggactcaggcatcagaaacgccttttaaaagt

SEQ ID NO: 53586 - DNA, 462 bp, Mus musculus
  source 1..462: mol_type = other DNA
tatatatatatatatatatatatatatacgcctaaaatgtaaacttttgcagacttcctatgaaactgaggctggcccaaccctcctgtgttacagctgagtattggccctaaaatgtacctttaaaaatgattaaagtcaaatgtaataaatttttaaaatgacaattaaaatgttactctgtaatttttgtgtttaagatactagttagatattttatatgatttttaactagtgttttattattttaacctgcatgtatgtatgcgaagagcaacgaggcatctagttaaagtattttaaatgatgcattttacgttttatacatagtaacatgacaaaatcatttatttccagaaaatattaaatagcccattcataataagtgacattaattattaactgtgcagcacttttgacattacagccccagggagatgaccaactctctgctctttagcc

SEQ ID NO: 53587 - DNA, 392 bp, Mus musculus
  source 1..392: mol_type = other DNA
agaattttcttggaagactctcaatttaggattttcagcaccacagtgcaccatgtggtggataggacttgcttccaaagtaattataagcagagttttaattaaaaggctattcataaatacaaactactaatgattaacacatagatggatctccgttgaggccagcctagtctacagtcaggactacacagtaatgatgttgacatttctttaccttagtcatttgaatttcatttccctttgctaatttcaataaaatatgttagaattgaacagggtctctattttattttatagatattttattttatagattatatctaaactagagatttccatcaactgaacattttaagtaattttagtaagcagtttgagctaagcgcatg

SEQ ID NO: 53588 - DNA, 272 bp, Mus musculus
  source 1..272: mol_type = other DNA
ataacaattagcaggaaatttggaaactttcttgatggattaaacaggatactttcaaagaagtccactttttatttagacatcctttgcttcaaccagctaaaagcatttccaagcttgatgctggattctcagaactcagtgtagaggacagagcgtcacctgtctccacacatgtgggaacagaatgaactcgatctgtaggtcaggtcagaattcacagaactctggcctaagtgatatctcatttacctaaggacagactccagggg

SEQ ID NO: 53589 - DNA, 320 bp, Mus musculus
  source 1..320: mol_type = other DNA
tttctgtttagaagaaatccagttttgaaacgttttaaaatctaatttgtttgtttaaaccaaagcctgcagcctttctagcagcctgcggtcctggcacgcacggtgactggagtttccaggacattggggaaaaaaaaaatcagcctcttgttcggtcccacgagggggttgcccgctccccctgtaaagagtggagaggaacagggcctctgagagcgctcgcagcggacagggacggcccaggacggtggcgcgcagctgcggtggcactgcgctcccccgcccccgcaggctcgatctgaagatgaagctccacc

SEQ ID NO: 53590 - DNA, 515 bp, Mus musculus
  source 1..515: mol_type = other DNA
agggtccatctcattctgtgattatagcaggactacaggagaatccctgtgatgacaaagtttggagctgaccacactttgagaggtttggccggcaggtggcgccacatgatcgtgagcagctgagggctcacagagtcacggagaccgcaggtcctcggcgttgctagggccaccctgtcaccgcgatgctcccagggaggcattctgcggcgacacggagccccgtggagcccgcaagtccctgcagcaaggacccgaggcctcgcgcctcagggcagtattgcagggctgccaagccgcgcgcgcccacagggagcgccgcacccgcggaccgctccccgggatggcgcagaggaggacagtggccctcatctccccgcccacctcccgtgccattggtgcggcacgccgcccccattccagccccctggctgggaaggcgggcacccgctcttgattggctggcagacctgcctctcgcgggagaggctagcacgcccctccctccgctc

SEQ ID NO: 53591 - DNA, 403 bp, Mus musculus
  source 1..403: mol_type = other DNA
acttggcttagtcttggatgataccatctaaaggaaatcatcttggaagaaagatcagttgcttttccgagactaaggaatgcaggatccagaactaagcctggagtctgtattgtttcattctatcaataatatctcggataaatagtgaaactaggatttgaactcattctgtccctatgattatcaagttaaggtcttccagggagattcccaccttagggaaagcctctcgcagagggaagttccccgagccctgtgaggggccctgagacaggaccgcccgccagggagcatcgccgcggccggcttctgcggcggagcccgggtaaggaacagagcgccggtccctggccgggcgcgagctgggggcggtgccggggcggcgggggcggggagggcg

SEQ ID NO: 53592 - DNA, 557 bp, Mus musculus
  source 1..557: mol_type = other DNA
tgctatatgcatgaagactgacatcaagggcttgaagagctagcttccagagtccactgcgctctgtacggaaaaggacagggcactctttcctatgcagcatccttacctggtagccggccacctcagcgctgtgccctccagggactcattggctccgcgcagaccctctattggacttgtaccactcctcggcggactgcaggttgccgaagtctggtttagccacggccacgtccacctcggcggcggcttgcgaagacgcctgcaacgtggccaggagctcggccacctcctcgtcgtggacctggcgcacgaaagccagctcgtccagctccagatccaggcgggccagggtggcgccgtccacgtcgcgctgctgcgccttcagggcgcgctcggcgccttcgcgcccgcggctctcctcctcgcagcgcgcccgcagtcgctgcacctcctcggccagcccatcgcgctccagcagggcctgcgcgcgcgccgagctcgcctcctccagctgcgcgcgcagctcgcgcagctcgcgctggaagagctcg

SEQ ID NO: 53593 - DNA, 703 bp, Mus musculus
  source 1..703: mol_type = other DNA
gacagggcactctttcctatgcagcttacctggtagccggccacctcagcgctgtgccctccagggactcattggctccgcgcagaccctctattggacttgtaccactcctcggcggactgcaggttgccgaagtctggtttagccacggccacgtccacctcggcggcggcttgcgaagacgcctgcaacgtggccaggagctcggccacctcctcgtcgtggacctggcgcacgaaagccagctcgtccagctccagatccaggcgggccagggtggcgccgtccacgtcgcgctgctgcgccttcagggcgcgctcggcgccttcgcgcccgcggctctcctcctcgcagcgcgcccgcagtcgctgcacctcctcggccagcccatcgcgctccagcagggcctgcgcgcgcgccgagctcgcctcctccagctgcgcgcgcagctcgcgcagctcgcgctggaagagctcgccgacgcgcgacggctcggcgtggcgctggcgcagcgcggccagctcggcctcgagcgcacggttctgcgtctccagctggtgcaccttctcgatgaacacggcgaagcggtcgttgaggccctgcagctgctccttctcgggtgcgcgccgccgcctggctcaggtccagcccgtcggaggccggcaggcggcggtaggccaggcccaggccgagggacgaggcc

SEQ ID NO: 53594 - DNA, 392 bp, Mus musculus
  source 1..392: mol_type = other DNA
aaaaagtttatttctgcctgtcaaacaactcttcaaaggctttctaaaaagctgaattattcaattaagctacagggaaaataaagcatggtaacaacttatattttagaaaataatttggctctttggtgaaagatacttaaaaaattaatagtttgcgttttcctcagtgttctgggactctatagttcccattatagacccccatggcttgcatgaactgctagaggccaggaagccgaggtgacaggcatgctccacgcgactcgtccacgagcgtaggtaagaccagggctacttccgttctgacgtcgggtctgacgccggctgaaacgggggacttggcgtttatagccaatccacgccgagggccgagtcgtcgcggcctgtcg

SEQ ID NO: 53595 - DNA, 414 bp, Mus musculus
  source 1..414: mol_type = other DNA
ctttaccacttggctccaattgaaaactatattttatttatttttcattttcttgcatatatgtatgttcaccatttgcatccctggtgcccagagaggttcttcttaaagggcctctctgcacgagcatcgaagtgctcttaacagctggagccatctttccagctcaagacctgtctcaagacgcctactcaaggctgaaattaataagtaggtaaccatacttggcttaaactaattcaagaacacatggcatctagagttcaatgttccatgaataaactggtgcaagtaaaatactgaaactgtagcattttagactaggcgtggcccacacgcccagctccgcctcacctaggtagcctaggtgaaccacacttcccagcggcctctgcggagcgccggcgcctgcgc

SEQ ID NO: 53596 - DNA, 396 bp, Mus musculus
  source 1..396: mol_type = other DNA
tctttaaaaaggaaaaaaaattttttccttaggacagaaatggtttatttggtaacaaggaatgagaagaaattaacttttttttctctttaactttaggtctccggagacagcttaaatttatttttagaaactacatccagcttaaaggcttttttaaaaaaaataaacgatataacatatactgtaaagttcacaaagtttcgccttatcgcagcactcagcttctgagttcgaggccagcctggtctacaaaacagccagggctctatagagaaacccctttccagtaactaggaggcctctttctgataaatgcaaactgtaaagacacctttaaacttgttgaattaaaagagctcgtataatataaaacggctatctcatatgcaataa

SEQ ID NO: 53597 - DNA, 375 bp, Mus musculus
  source 1..375: mol_type = other DNA
gaatacagaccaagtgtgtgtgtgtgtgtgtgtgtgtgcacgcgtgcacttgcaggagacctaactccagagtggtgggagctcaggcaagtcccccgacaagccagactcaggagggtgtggcttgtccctgctcagtgtgaacttgactcatgacttgtgagctcccagagagggaactcctcccgcagcttctgccaggtgggtgtcaactggcctggagggcaagcctaggcaagatctccttgagggccctgcctggcaactgcctagaccttcccagatggcccccgaggggtgctcagggagtagggccagccacagcgggcccagaggcgggctgggacaggacgcagcatcggagaccgcttctcc

SEQ ID NO: 53598 - DNA, 607 bp, Mus musculus
  source 1..607: mol_type = other DNA
cctcctgcaggtagcagtgttcctcgaggaagccaccttggtctactataggctttccagctgacagaataattcaacttggatgaacatgcaaaggatgtttgaacagtcagggtttaacacgtgccaggccctgaatcccgtgctagggagcctccggctacctcgccacgccctggctccggggctcccagcgttctatgtcccaggacagggagacgccatctattcctgacgtcaggtccggagcagtgccgcccccaaccctgggtcccgcgcgccttcgagaacttatagccagcgggaacgcggcgcgccccgagacccacatctggcagagcgggcgcgcgcgtgtcactaagacgaacaaccggagccccggagtcctggcgacgctagggcgggggttgggggcggcggcctcgggagggacctggcgggagcgggggcggtccacacgagccgggcgctgcaagctcacccgcgggcgggagggcgccacgcacgtcgccgcggccgtccccgcgggcggggaccgagcccgccgacgagcctccgagcagccgcgcgccgagccccgactctatggcccgcggggagcgcgccg

SEQ ID NO: 53599 - DNA, 402 bp, Mus musculus
  source 1..402: mol_type = other DNA
cagctgtaattttgctacggctaggagtctcgtaatgtaaataaatatttttggagacgatcatgatccacaggttcagaaccgctgggatacaaaatctaatccgtttttagagcccaggcctggagggtaaaggagacctggtttcccgaatccactggatggatgaccttggggagccggcctcactcccaatccacactgggaagtggggcataagctaaccgtgcgagccctggggcgctcgtcactcgcggtgctacctcgcgctgttccggggctggaaaaacggccagactctagtcggccccgagctcggcccccccccgcacgcgaccgacaggccgcgacgactcggccctcggcgtggattggctataaacgccaagtcccccgtttcag

SEQ ID NO: 53600 - DNA, 236 bp, Mus musculus
  source 1..236: mol_type = other DNA
gtactaaggacaatctgatacgacccacaggttgagaaccagtctgtcaggtggggggctcccggccacgccgctggtcaagaggcagtcaggctgaaggtgggcacccccggacccctgccttcccagccttcctgggtagcaagattcggtgggagtggccttcgccaacctataggaaggcccgccccctgggctgggtggtgcttcccctcggtcatctgaccaagggggga

SEQ ID NO: 53601 - DNA, 300 bp, Mus musculus
  source 1..300: mol_type = other DNA
aattggaagcatccatcctactatgttcccagccattctgtgccacagagtctgggagacactgtccgctccttctgtggccagggcagtaactgaaagccatggttctattgtcagtctctcttggaggaacctcataggggtggtttccgagcgagagaaacagtaaaataccccattgcctaatttcgttgtttgttgctttaaaaagaaaatttaagtttgatttcctggaacaattcccgggctggctcgggaatctccgagattaccccaagagcctgcgcagggtgtatgcgg

SEQ ID NO: 53602 - DNA, 289 bp, Mus musculus
  source 1..289: mol_type = other DNA
tggaaacgccaggccatttgtatggccacactagtggtgttagcacatccagccatatcgagatggcacccagcctgtccatttgccagcttggtgcttgtccaatacagtggccaaacagtgccttgctcctggaagcaggacaaggcgcctttgactccaaggcttttaaaacttcccagcacttaaagacaagcagcctctgctggctgagatggcactatctgcctggcccctggaggtggggagggaggggcgctcggcccgccagcgctggcgctggcctcaa

SEQ ID NO: 53603 - DNA, 297 bp, Mus musculus
  source 1..297: mol_type = other DNA
tccagaactacttttttaaaaaaaaatagttgtcgcattcccttacatattgctttcttgacaaccaaatgtattggcattttaaaagcctttaaataagtgattgatttaaaatggtgtgacgggacctgacccactctgactggtggccttccaaatttctgctttcttcaatcagtttcagatctttagctcttccagagctcagagctcagagcccagagctcaggaaccttggccacaggtccttgtgagccagtagggaatttctaatggttaatctacctgagctggcag

SEQ ID NO: 53604 - DNA, 679 bp, Mus musculus
  source 1..679: mol_type = other DNA
cgtgcagcctcccagagtctagcaaggggcctcctgggggcccccagagcctagcaagggggcatcccgggagtcggccagggtctagcaaggggcctcccgggggccccccagagtctagcaaggggcacccccaggagtcgagccagttctcaaatatctgaattccttaggttatttttttctcagatttgaccaaaacatgtgccgagccagcagggagccgagcgggccccgcggtttccggccctgccacgtctgaaagcctttgcggagcctgccagggggcgagcgctgccagagggcggtgctctcgggcgcgccaccctgacgatacccaccccgcccccaaccccaccagggaagctgctcgggaaggcagctggcaccgcaactcccaaaggcagtggcgagcggaagcgcgcccccctcaggcccctccaagggcatggacgccaccccacggctggcggccgcgcgcgcgtagccgagccctggagcgcgccggccagccctgccaatcacgagccgcgcccgcctcccgccaggccccgctccgccccgtggcccaggcccgcggcccgccgcgcacgcgcagtcggagctgtacggagcacatccgcctgctccggccgtctcttctccggtgaggctccgcccccggggcgaggtcagtggg

SEQ ID NO: 53605 - DNA, 715 bp, Mus musculus
  source 1..715: mol_type = other DNA
gatgctgtattcaaagtcactgaactatggctcaaagcccaggctcccggcgtatgagttccgaagcggaaacacgccgaaggagacctggccaacgacgtcgtggagccacccggctcgggaggaggatggaagcgctcaagcctccaccacacctcccgccgcaggcgccaccgagccgccgcgccgccagcccggcggagccagcgcgcgtgcgcggggccagagggtacgccctcgcgagcgcgcggggagcggggcgcgtcaccgcgcgggcgagcgcgcgcgcggccgaggagctcgggcgcgctgcgagacggcgtcggcgtccgtgcgcgctgcgggccgaggctgtgtgggctgaggcgacgagcgaggcagcggcgccccagagccgaggggacgcgcgggtgtcgcgcagtgcttcggagcagacgtggggccccggcgggagagcttggcttcgccgctacgcgcctgccgggcgccggccgcttcccgggtccggagcggccgccgccccgggagacgcgcggtgacacgggcctaaggcgccgcgggccgcgggcgtccgcgccgctcggacccgtgcggcccggtgcgggccggggacgagcgccggggcaggtgcagcccccggggcccgcgagcgaggtgcccaccgtgccgctcggcccgtcccggctcgcggcggccgcgcgccccactccggggc

SEQ ID NO: 53606 - DNA, 187 bp, Mus musculus
  source 1..187: mol_type = other DNA
ccctgccactgtaacagttacagtgatggagtgaacattccctagaccaggctcagccatagaatagatttataatattattaataaccgtcttgacacttattaatactgagcttcgctcgccgctcgcccataggcggcgcccgccagccaatgggcgcggggttcccggtctccaggatacagg

SEQ ID NO: 53607 - DNA, 384 bp, Mus musculus
  source 1..384: mol_type = other DNA
agcgcaggtgaggccgaaccccccagtggcggtggaccttcgggcggctatggctccaacccggagttgggacgcccggcggccgacgcggaggcgggcccgccccttctcacggtgctaccccgcaattggccgccgagccctgcgctccagccaatacctggctcgtctggaagagcgagccaataggcgaccgcgtatccgcgaggaaccgccagggcctgcccgggggctgggggccggcggcacagatggctccgcctccccagggtgcgggccccccatcaccgtgaagctaaaccctaaatgcggcgctgagcggttattaagattaacctttcccattgggagatacctatagaagacagaactatatctgccttg

SEQ ID NO: 53608 - DNA, 333 bp, Mus musculus
  source 1..333: mol_type = other DNA
actggagctggctccaagggcattctctgcttctccccgagttaaataagaagacagcagttttcgcaagccctctggagatttttttttttttcttatggactcaaaaggctaaattttctcagcccactgtgcttatggatgacatccagatgtgtccaggtggctagaccacctcctagacccctcttcccagaaggcagacaggaaaccttcggccacatgacacaagaaaccacaagaccccttgtgtggaatccaggatcgcagcggccgatgctttccctttaaaggcgggggcggctcccggccaggaggcgcggtctgggcggg

SEQ ID NO: 53609 - DNA, 320 bp, Mus musculus
  source 1..320: mol_type = other DNA
taatttcttaaaaaatcaaggcagatatagttctgtcttctataggtatctcccaatgggaaaggttaatcttaataaccgctcagcgccgcatttagggtttagcttcacggtgatggggggcccgcaccctggggaggcggagccatctgtgccgccggcccccagcccccgggcaggccctggcggttcctcgcggatacgcggtcgcctattggctcgctcttccagacgagccaggtattggctggagcgcagggctcggcggccaattgcggggtagcaccgtgagaaggggcgggcccgcctccgcgtcggcc

SEQ ID NO: 53610 - DNA, 271 bp, Mus musculus
  source 1..271: mol_type = other DNA
gcggtgccccccagggccttcagaacaatctgatctaattctggtttgatacagacatctagatttggatatcaagaaaaatgtcaagtttttgattactcataaactgtgaacctcaggtcaacatgactctaatttcttaaaaaatcaaggcagatatagttctgtcttctataggtatctcccaatgggaaaggttaatcttaataaccgctcagcgccgcatttagggtttagcttcacggtgatggggggcccgcaccctggggag

SEQ ID NO: 53611 - DNA, 432 bp, Mus musculus
  source 1..432: mol_type = other DNA
ccccaatcaggaaaggggtgaagtaccctgggccaagggccagggtctatttttcccgatgctcccgaggtgctcccgagaccaaagtgatcacctcagcttctcctaggagctcccgaaacgaactgaaaatttattccagccctttccagcccctcccgttgtaggaaattgttgatatactattaaagttttgtttaaaggctctaaaagcaatacaaaaaatttagcaaactgttttaatcttgtgtctcgttttatattttcctcgagggacaaaataggtggccccaggaatttctggagcatccgagagacccagaggatggtctccgaggcgggtccagagtcccttaccggcaaccgtcacggtcgtccttaaggacctccgcccggcgccagtaaaggcgggtgttttgttcttataaggag

SEQ ID NO: 53612 - DNA, 338 bp, Mus musculus
  source 1..338: mol_type = other DNA
acatatatagggcagtgccattaagggatgcacctttgaaagcagagtccacttttttgcagaacacacatgatctcctacaggggaatttatatataggtccgtaaatgcacaccagtcaacaatggctatggtggtgattggttcaacaacatgtgtcgggtcttcaatttgaaatgccaagcagaagtatttctaacgttcattagcaaactaataaaaacacacgagaaaatgggattgattttttttaaaaatacatatctgagcacacaagcacttattaacaatcgcattcacagtgcgggcacggggctcgcggcagggggcgtggcggt

SEQ ID NO: 53613 - DNA, 460 bp, Mus musculus
  source 1..460: mol_type = other DNA
ggtgctggaggaccgtgcctcatgaagaggggtgctacccttccactcacaggcttctggatgtgcaaacagcctatgcgtgattctcgagcacccacggccggagcgcacctcgcactccccagtgtaaacgcgcacgcagggagccgcgcgcccccgcactctcgcctgcgcgcacgcacgcgcacgcacgcactccccgcgcccccgcaccgggagggggcgcaggcctccgggggcggggagcccagagcagagtcgtgggtccatcccgcgcttggcttcagagcggtagctcccgcctggccctggtctccagatcgagaacagttggcagtggagataatttactggcttcccaactccgcgcccgaagctggctggctggtggtgaacactccttttcacaaattttttaaaagaggtcggtggaaaagagagcatttaataaactgccttt

SEQ ID NO: 53614 - DNA, 407 bp, Mus musculus
  source 1..407: mol_type = other DNA
tcctctatttgttgatatacagatctataacaaactaccattcagtgcactgttaccaaacaatataactacaaaatacttggggaatctcaccaactatatatatatatacacacacacatagactgaagagggagagccactcatcttctaaactcctgctccgggagcctggggctgctcgccccaagaggaagggtgccgcgcgccttggggagggtaggcgacagcgcagcccgcgcccgcagccctggacacagcgcagctcggagacgggacgcagtgccccggagccccggcagagcccgccctccctcccgcgtcgccagccggcgcgcggcgccctctccgcccgtagttcggctccacccccgcgcggcggcggcggcggcggtggctcgcagctc

SEQ ID NO: 53615 - DNA, 407 bp, Mus musculus
  source 1..407: mol_type = other DNA
tcctacgtgccaggacacaagctggtcacttacaatgttgtgctagcatctcactctttagaaaactgttaaattgatatgtttttcatacctataattggactaatggggaaaaattaggatgagtccaaatattctacctaattcaaatgattgtttcaaaaaaaaaggaatttgagcatgtatacaaagaattctgtaataactatatagaactcttcttatatatgctcaaattttacagaagaatgtactacagggcttcagcccagttgaccaactctgagggtgagctgggatctcatctgagttaaggctaggtccctaacaactgcagtttcctggggaaaagaaggtctcaccttctgggacaatgtcccctgctgggaactggttatttggaaact

SEQ ID NO: 53616 - DNA, 222 bp, Mus musculus
  source 1..222: mol_type = other DNA
aacctgtgcacatttgcctaagaaattaatgtgagacatagcttttcatagacagtttctggtaaagaaactttgaacttcagactcgacctcccaagtactgggattcccatggtttcctctgagctaagtgtgtcccatgggaggtgctccctgctgtgggctgctcctgatagcagggtgagagtcgtgactcacgcaggcctgcccagccagggtgac

SEQ ID NO: 53617 - DNA, 310 bp, Mus musculus
  source 1..310: mol_type = other DNA
tctagcaagacaaccctccagccaggcccaggggcttttgaccacagatattacgtcaagatttttgcccttaaaacggacgctttaacgcccgatcgttaggtgtctccaggaccctaaaataggttcttggagaagcatgcagcttccttagctcctgtccttcctcttaaatggagaggaagatcagtgacgaacgcccactccggtgaacgggcggggtttacagcggggcggagcctctgcgtgagcacgccacagaggggaggagtggcctgcccggtgcgcgcgcctggccgtgggtgatcag

SEQ ID NO: 53618 - DNA, 260 bp, Mus musculus
  source 1..260: mol_type = other DNA
tctctcccaattatgagaggagccaaaaaaattgttttttgtaaataaaagtgtcttgaaacagttttacgctaatacagtggaactgagtagttgcattcctatttggcttacgaaaaacaaaaattgtccagtcctccaaaggcctgtgcattacaggaaccagtctctggtttccttgtgttacatcgggccctcatttgaacccgaagccagctgcctcgagcctctcatttacgtgaaaccccgccctctagcaa

SEQ ID NO: 53619 - DNA, 567 bp, Mus musculus
  source 1..567: mol_type = other DNA
cacattctaataatctaaatagtagatttagaagtatttaaaataaacaaaaccacttggatttcctaatttctctaatttgcaaaatttcactccatagaccagtatactcggttataattttctaaaattaatttagatatattttattctggatataatagattttataacatagacgtcaacattgaaatctatcaataatatattctctgatactaagtgctagtatcaaaaaatatattagaactgggtatagtggtgcacacctgtactgcagatttctgtgagttcgaaacagcctgctaaatacctcacagattatgtatatataattaataatatataattatagatataatatacaatataaatatatgtgtaaatatataaatgtaaatataaacatgtattagaagtttcagctatattttaggtgttagcactcacatgaggtttatgtaattaatcctttcgtacttgtagtaaatactgaatagtctcttaaccccaatattactttaaaattagtgctgtactgttttgctcagtctaaaatttaagaga

SEQ ID NO: 53620 - DNA, 390 bp, Mus musculus
  source 1..390: mol_type = other DNA
cccttgccccgtccctctgtgggagtgagtgaaggcgggaggctccgccccctcctgtgggagccgagctgacagtgggcttctccggcagcggatcggagctgcactggaggcgccaggcaggcgccctgcaacaggccctccgcctgcggagcacgtaggcccccactgccgcagctgcacggggagcttgcagctcgggcctcgaggggcggggccagatctcaaggggcagcagaggcggggcctggacctgcggggcccagcccgtactgggcggagtgaaggctgctgaggcggggctagagctctcgggccatggggcggggccttgaaaggcggccaaggcgtcagtcctggaccctgtggaggcggagcccaaggggcggg

SEQ ID NO: 53621 - DNA, 300 bp, Mus musculus
  source 1..300: mol_type = other DNA
tcttcagaggcatttctgagcacattcagagcagacattcattgagttaatttcatgagagttgtgaagtgtttgcatacatgggctcatgtatggtctgaagacaacttgtagaagtccactgtgtgtgttctattacactaaaaatagtttaatattctagagccagcgatgtttctgacaccttgagatatgtaaaaactgctgttgctaaacttagaacttccacccacccgtgtgagggttgagcatcaaggaaagccgatctgcagacatggacttttcaaagatcatttttag

SEQ ID NO: 53622 - DNA, 401 bp, Mus musculus
  source 1..401: mol_type = other DNA
gcttgagtaggccgagaactccaagcctaccaggcctggctcccagtggtcctaggttgccacttctatctagggggcactctgtcagccctgctgtgagctttgcacagctggactgagtgagtgtggagagatgctcacatctcctcccgcttcctctttgcataggtacacacaggtgtgtgtgtgtttgattttgaaataaggtcttttttatttttttaaaaaatgcctagcagctatcattgaatttatttttctgtaaagaaaaattgtttttatccaggtccagtctggataggcagggggcgggccctgcctccctagccgccaccattgaccggtcagatggcatcgggctcgcactaggacccaggcgccacagcgcctccgtccgtcct

SEQ ID NO: 53623 - DNA, 451 bp, Mus musculus
  source 1..451: mol_type = other DNA
caataaagcttactgaataggaacaagtctggttcagtgcctggcacgtgtctggccttaatgcataatccatcttatatttgaactgaagtcagtatgaatccagaacaaaatctttatgtcctttccttgtatcttttcagtctaaaaacttttgtcagtgtctcattaagcgattttatttatttatttatttatttatttatttatttatttatttattttcttttagaggggaaatgagtgtccttgggagcagacccaagtcttttcctcagaagcaaaccatccttggaaccaggaaaggtcccggaggccatcgcggagtccaccatgcgcaggcgtactgaggcggcccatgtccctcggcacccgacgtgcactggcgggggggtggggggggaaggggcgggcggggcgggtcttgccgctgctccggtccctcccccgt

SEQ ID NO: 53624 - DNA, 366 bp, Mus musculus
  source 1..366: mol_type = other DNA
agcgccgagagctcaaatttaagtggtgtgaagggaggtatttctcattaaaattacattactcttgaattatttaagtcaaaaaaaaatcgcacattctggatgggtgtttttaaactcaaaagtcagaggtgacagtcacttcatgttgactgtcactcggtcataaacatgcatgtctcacaacttattggctatatttattttctaaacaacaaaaaacttaactcgctatgcgggctcagactcagatccgccgccgctccctgtgggacacaaggcgccttccgaggctgcaatcgcaggctgctgagagggcggcgagggtcatgtgacccgggcgccatcacgagagtccgtaggtct

SEQ ID NO: 53625 - DNA, 249 bp, Mus musculus
  source 1..249: mol_type = other DNA
tagcctaagaggtagttctggccaaaagatgccctggagggaagtaccctcgaagacctgggaagcagctaggggtctggcccaagtccgtcttagctcttaaacatacaaatggtctacccagttatcatgcccttgctgcagcccggtttttcttgcaaagaaagctactctggaggcgagcctctgttatccagtctcaccagcagaggaagtggggtgctcaagggccctgatttcccctaggtg

SEQ ID NO: 53626 - DNA, 420 bp, Mus musculus
  source 1..420: mol_type = other DNA
tgcctgccctgagcacctgcccagaggttaggctacttgtagcctagatccgaggagccacttgtctgccaggaacttgtcagtggctcctgattgggattctggggtcctagaggcaaaattaagataataatcaaaataatgttggatgttttgatgaataaatgaatgaatggatggatgaatgaatgaatgaatgaatgaatggaagcatatagttattattagttaacaaaggaaaccgggtttccatgagtataaaggaaaaaagttgggatcccaccttaaggctgggacattccctgaggcaatgccagacataatccgactgccagtcactgcctctcacctccttagcaggtgctcggaacatatttggaagattaagatggatgtcatacctcctagctttgcataaga

SEQ ID NO: 53627 - DNA, 203 bp, Mus musculus
  source 1..203: mol_type = other DNA
tttttataaatacaggctgaagggatgaagactgagttatcttataaaagtaaattagaccattatcctgttccttccgcaggcatcttgccaccgtggggtggatgttcagattctccgatggagcttcctcaaatagagtctgttgtggcattattcaaacaaacaaacactcatatgcaaattaacttgtaaaatagaca

SEQ ID NO: 53628 - DNA, 223 bp, Mus musculus
  source 1..223: mol_type = other DNA
tagcttatgctctaagttcaacaattaacaaattggacttatacaatttggaagaatatatttaccaatcctacatctggtaaccctattttaaaaatgggggttcaacattggatgactagctagaatgtggtacattaacaaaatggagtactactatatttcaaaacaatgaattcatgaaattcttagtcctgagtgaggtaactcagtcaaaaaagaa

SEQ ID NO: 53629 - DNA, 484 bp, Mus musculus
  source 1..484: mol_type = other DNA
cctgcctggtcatttagggactgaccctcagggtttctctgtgtagccctggctgtcctggaactcactttgtagaccaggctggcctcgaactcagaaaccgcctgctttaatttacctatttcaagaaatttatttgtggcaattgagttctctcagagccgtcaggaggctcggaactgacaggccacgtcctttttaagcggcccggcgaccacgtgacctccggcgcgctcggcgattggctccgctcgttggcgccgagcaggccccgcccctcacgggcgcgaccatagtccgtgcgtccggaggtagttcctgccggcctctggagcggggctcctccgagtcggactcccaaggaggataagaaaatccttttctcagatcaggtccgtctaagagggccgcgggagaggggcctttcctacgcgacagagtggaaccggcccagcgtggttccgcccgacgcgcgggccccgcc

SEQ ID NO: 53630 - DNA, 801 bp, Mus musculus
  source 1..801: mol_type = other DNA
cgaggcggccactccccggccggtgctcaggtgcaggagggtctgcgggagcaggtgtcccctgtcgccgtctccagctgctccgccctcagagcctcacaagtgcgtcgcacagctgccaccccggtgcacacgggtgtccggcgcaggtgggctccgggcaattaacagagtcggtgaactccctttaaatttccagagacgctgccaataaatatgaaagaaacgtgtgcctggttttcttttgctctcgtgggaaaattcaaagaagctgaccgcgtggtgagctccggggcctgatcatctgggccccgagatcgcagtcccggatgtgacagtgtcgggtccttccagaggcgctggctgggctccagccgcaggaggatgccaagccccgggcgcacttcgcgctggcgatgtcctcgggactctgccggagccgggcagcctgtgagctccggagcggcggagggcggctgcggggcgggccggcgtgtcgccctctcacgagggtgtcgcgctgaggagcgcctggctggtcaccccgaagggctcgcggtggcggtgcctcgggtggacaggcacagttgtcccggtcaccccgcgcgcagcagctcctgggcgtctcgcggcttccgtggccccggggacgccccctgttcccccgccccctccgcagcctctccagcttgagcgccgggaggtggaggaggcggcgccgcggggactgtctcctccccacccttctcgtcggacaaggggactgggcacagggaccccggccagtgagcgcttgtgttc

SEQ ID NO: 53631 - DNA, 579 bp, Mus musculus
  source 1..579: mol_type = other DNA
catgtaattcacatgcagccatggaaggtagcaaaaatttccattgtgtatctattttaaaattcatttttctagatcctaagttgtttaaaatgaagtaagcagccatgtagacttgcatgttagttaattctgagtagaattagagaatctttttaccatgttctcttgggcaggatgataacatcttgatgtagcctaacagttacgacatgaattcaacatcaggtgctattcttgtttcacaagttaatatccttttagagaaaaacgatatagagctaaagggtcttacgcgtgtcatctaagttcccaccacagcacacaagggccgcttgtggaggtgttttgagtgtttttttaaatgaaaattttagattatagaagcgacatgctgaatagagaaagggttacttaaaaaacgtcttcctgtccctacagctgctgctgcggtcagaaaagatcagtacatgaaatattcttgattagtcaaaactgctgtttttattttggagtaaattttagattttgttagagagttaatgtaaagttaactttaagactgtattaagctccctg

SEQ ID NO: 53632 - DNA, 504 bp, Mus musculus
  source 1..504: mol_type = other DNA
cgctgtcagggggcagcctgccgctccccgtgtcccgcccgccggccccgcgcgggcagcggctccgaggctccggcgccccgggccgtggcaccccggaaagcggccgcggcgcctcccagggccccgacccctcaggcctcgccccggctccggcggctcgcgcctgtcaggacgtgtgggcctccccttaccgacggccggccgggccccccgacaggcaggaaagcagagaaccggcccacgggcgctcctgtgccgctcccgccccaggctgccgtccggagcccggactccacccgccccagcccccttgagcgagcctgggcattcgctagggaaaccttggcgccagcttgcggcagtgcgcggtctcccgcccactgggcgccgctggctagcagccataattgatgatggcaggagtatacttacggaggatgtgcacacacacagtccacactgggcgagttaattcgcgatcgggaactttcctagtagggt

SEQ ID NO: 53633 - DNA, 300 bp, Mus musculus
  source 1..300: mol_type = other DNA
ctgaggtgctgcacattatctcaggcgataaccatagccatggttgagaaacccagctttggaagtgggaaatagtggggacctcaggagtagagaggactggccggtctggtccacgagccgcgccccagcccccagcccccccactctggctggtggccgagcgggtcccaagcccagcgcgcatgcgccgacggcgccccgcccccctgagccgccgcctcggctgcagctcggccgccacgattggctgcgggacgtcctcctctcggccaatagacgccacgccgtcgcccccgt

SEQ ID NO: 53634 - DNA, 574 bp, Mus musculus
  source 1..574: mol_type = other DNA
cagtaaacctcaggagaacaggattacttcatttttttttctggaacaaaagttgtactttaattttcgtttggttaggtataagcatatttcaatttacctgaaaattgtctgtagttatcagaacgattgacttcttgactccaaacatgtcttggagacacataaagcattttaaatatttttaaaatgtcctttaaaaggatattcacaatcgttctagttgaaccggtttctttggttcccaaaatttggagtttctaaacgtgcaccgtgccccactgtgcagacctagggactgcgggcctggcctcgcccggcggccgatccggctgcctcgccctacagggaacctcagaggggcggagggaaggctggccaccgccccaccagccggaaaccctctgccagcggaagcggcccggggcctccgcttagcctgcggttcatccggcctggccggccctgctgtagggcgtcagggaccactcgtcagctctgggagaggaggcaccccctggggcgcaggcggggtccggctactcccacctcctggccatgaccctactaggaa

SEQ ID NO: 53635 - DNA, 639 bp, Mus musculus
  source 1..639: mol_type = other DNA
tcgtcccgcagggtctgcgaggaggagaccgctcagcgccgaggactttggggtggaggcgcagagaccccaccccacagccctacggccgcgcccgccctcccgcccgcccgcccgcccggcgccaagcgtcctcgcgacccgggcagccccgcagtcccggccgggaggcgccgagagaccggagcagccggagcgcgactgactcgccgccccgggcccgcgcccgcgccccggcgctgtcccggccgcccgctccgcagtaggcccggcccggcgctgtcagggggcagcctgccgctccccgtgtcccgcccgccggccccgcgcgggcagcggctccgaggctccggcgccccgggccgtggcaccccggaaagcggccgcggcgcctcccagggccccgacccctcaggcctcgccccggctccggcggctcgcgcctgtcaggacgtgtgggcctccccttaccgacggccggccgggccccccgacaggcaggaaagcagagaaccggcccacgggcgctcctgtgccgctcccgccccaggctgccgtccggagcccggactccacccgccccagcccccttgagcgagcctgggcattcgctagggaaaccttggcgccagcttgcgg

SEQ ID NO: 53636 - DNA, 409 bp, Mus musculus
  source 1..409: mol_type = other DNA
agccttactctcatcagaggtagatctatacaacctgaagatttctgcatcatgacatagtgcagtttgaagtccaaacttgcccccaagataggagaaaggactccagaggagcctggagccctaccgcctttcaaaggggcgcagtgcagagtccaggccttgagagtcccggcagctgctaggataggaggcctctcttcccttccttaggaacccgcaagcacctgcgcttgacctggggcggggctgctactgtctcctgggccagctagtagccgaacggccaagcaggcaaaagccgggtcccagaggcagcgctctcccgggtccgactcgggtgcgggctctagaccgggtcgacttcccacgtgggggctgacgccggctgctcggcaacgccggcttc

SEQ ID NO: 53637 - DNA, 502 bp, Mus musculus
  source 1..502: mol_type = other DNA
cgtgcaccgtgccccactgtgcagacctagggactgcgggcctggcctcgcccggcggccgatccggctgcctcgccctacagggaacctcagaggggcggagggaaggctggccaccgccccaccagccggaaaccctctgccagcggaagcggcccggggcctccgcttagcctgcggttcatccggcctggccggccctgctgtagggcgtcagggaccactcgtcagctctgggagaggaggcaccccctggggcgcaggcggggtccggctactcccacctcctggccatgaccctactaggaaagttcccgatcgcgaattaactcgcccagtgtggactgtgtgtgtgcacatcctccgtaagtatactcctgccatcatcaattatggctgctagccagcggcgcccagtgggcgggagaccgcgcactgccgcaagctggcgccaaggtttccctagcgaatgcccaggctcgctcaagggggctggggcggg

SEQ ID NO: 53638 - DNA, 229 bp, Mus musculus
  source 1..229: mol_type = other DNA
ttcccagaagagaatatttgtactgggtgcttattataacatattaattaggaccctgatgtaagctgccatgacagagggagaggagcggcctctctgttggacagggcctggtgctagcctaggctagctgaggtcagcacgaagcatgcagcttgggcagtgtaacgctaagcctggcggccggcagccccgacgtcactgccgcgcgccgcccgcgtcatcgcgg

SEQ ID NO: 53639 - DNA, 293 bp, Mus musculus
  source 1..293: mol_type = other DNA
aatgcatttacagggatatattcagtttttatcacttcctatgacactcagctggctgtgtcagtcagaccgaagctactgcgccaaactcatgaaattctaaaagggaattactgtttcaggtatttcaagataaaacactgccagtgtttaaaataagatcttactcaagtctgtaaggtgggttcagccaccttcacacggtcgtctgtgctgcagcagccacacacattgtttatctatcatacagatagatgcttttctaataatttgatacattgaactaatctctt

SEQ ID NO: 53640 - DNA, 254 bp, Mus musculus
  source 1..254: mol_type = other DNA
gggctccacagacggcaccatctgtctccttgcccagaatgagtccaaccagactgcctggccaattgtgagaggaggctatcccctcctcgagagctcggaaatgcagagtctgcgttattggaaggaattacaaatgttttaaccatgtctcagatatgatagcttaaaaaaaagaaaccatctaccctcccacggctggctgtgtttttctgccttttagcctgtaaacaaatacgcaagctcggcttgag

SEQ ID NO: 53641 - DNA, 227 bp, Mus musculus
  source 1..227: mol_type = other DNA
ggtcagacctgcaggtctaatcctaaggtaggctagcactctaagggagggggcagaacctgtcatctctcttccaattctgagaccgaggtctccttgtgtccctgggagaccagaaccctgaggtgtaagaggggtcagcggaaagggagccacttcaactgaatggctctggtccctctagctggacggcaatgaaaggctttgaaaggttccactttcagttg

SEQ ID NO: 53642 - DNA, 536 bp, Mus musculus
  source 1..536: mol_type = other DNA
gctcgtcattctagtgtgccacgaataaggataacagaattattgactaaaacgacaacgctgctgctgcatttttgaatactcatattttacaaaagataaaaaaagtttccaaggctatacaagcttttaaaaagcggtggggacgcagaaggtgctttgcatttgaagcacatttaatgccaatcgcagcctcgcgccagcgagccccgcgtgcccaggcggcgttccgcggcccccggctctccaggccgcccccgcccggccgggcagggtactcaccgggagggagccgagggacccttgcaatcttgctggtgatctcagcagtgagcactgcgaagtcctgctcatggcagctcgggcacggccggccggagccgggttctagcgctcagagcgggactcgccaagggcgcccggcctcggcgcagggaccctgtgaagaagtctccgaacgtaaaactaaagaaaaagttcactttcggttggagcgcccccaaactctaagttgcaggcgcgggctttccgagccg

SEQ ID NO: 53643 - DNA, 395 bp, Mus musculus
  source 1..395: mol_type = other DNA
aacttcttttttaggacgttctaaactgcctcccaacgagttgtgaattaactgtgacatgctctacgcatataatactttgtgtattaataagcaggggggggggataattccctccggggccgagggatgacacatgggtatgacgtatgcgtaacggattcccacggagcagatgcgccagcccggtcggtggattaagcgaggtctggggtcgaggcgaagaccgcctcgtaagcgggttgcaccccctgcggtgactcccacctcagtcatttccgggacggcccgggctcagcggaacagtctgagcgacggcgagacctgcgcggggaactcggacccgcgcgtctctggttcacgcggccgccgtgagcctcccgctcgggtcctcg

SEQ ID NO: 53644 - DNA, 399 bp, Mus musculus
  source 1..399: mol_type = other DNA
ggggggggggataattccctccggggccgagggatgacacatgggtatgacgtatgcgtaacggattcccacggagcagatgcgccagcccggtcggtggattaagcgaggtctggggtcgaggcgaagaccgcctcgtaagcgggttgcaccccctgcggtgactcccacctcagtcatttccgggacggcccgggctcagcggaacagtctgagcgacggcgagacctgcgcggggaactcggacccgcgcgtctctggttcacgcggccgccgtgagcctcccgctcgggtcctcggcgcaagctccgccatgcgcggctcggaaagcccgcgcctgcaacttagagtttgggggcgctccaaccgaaagtgaactttttctttagttttacgttc

SEQ ID NO: 53645 - DNA, 447 bp, Mus musculus
  source 1..447: mol_type = other DNA
cagagccttagggcattatccccagggcttggaaaaaaataaaaaaaaaacctttacattttccttaaggatatttttaataccccagacaatttgttttcttggataaaacgccttcttggcatatttaacctagtgggactttacattgaatgacatgattcactgtcattaaacaagccaagggaggggagccttaccctccctgtagtcccctggttctctcagagcaagagaggtacccagtgcggccgacttcatcggggacttaaggactgggtcccgccccctccaggagcgaggcccgcaccgtccgggcgcccggctcgcacgctgagcacaggccgcaccccgcgcgcctcccgcggccccggcccgccccgctcaaggatcattgttggccgcccccaccccggctgtcacgtcaccggggaggccccgccccct

SEQ ID NO: 53646 - DNA, 436 bp, Mus musculus
  source 1..436: mol_type = other DNA
aaaaaaataaaaaaaaaacctttacattttccttaaggatatttttaataccccagacaatttgttttcttggataaaacgccttcttggcatatttaacctagtgggactttacattgaatgacatgattcactgtcattaaacaagccaagggaggggagccttaccctccctgtagtcccctggttctctcagagcaagagaggtacccagtgcggccgacttcatcggggacttaaggactgggtcccgccccctccaggagcgaggcccgcaccgtccgggcgcccggctcgcacgctgagcacaggccgcaccccgcgcgcctcccgcggccccggcccgccccgctcaaggatcattgttggccgcccccaccccggctgtcacgtcaccggggaggccccgccccctcctttgaactgaaaagctcag

SEQ ID NO: 53647 - DNA, 324 bp, Mus musculus
  source 1..324: mol_type = other DNA
ctgtggggctcaccaccatggtcactggcttccagagggaggagcagcctctggctgctagctgagatcgattgagtccaaaggcaacctgtgctgctaggtaaggagcagtgggaacaattgtcccaaagtccccctggtcaaagaaagtctccaactaaaggcttatgtaatgagatttaaaagaaaacttttgaagtgtgtcaataacagtttggcattctttaatttatcgttcatgaatataattggagatcagaaatctaacaagtgtcaagatagttggtttgcaaaacattaaacagtatttgatgcctagttaat

SEQ ID NO: 53648 - DNA, 301 bp, Mus musculus
  source 1..301: mol_type = other DNA
aaagttaagcacaaatgagtatcataagtttctagttttgtaactacaaaatcgacaccattcagatttggtttttatccttctgggagtgtgaatcaattctcatttattcccagtgttagatctcaaacctgggccaacagctgaggttccatatccaagtggacctggacgctacctgttacagggtaaggctggtataccaggtacggcccagctcagactggccgtgtctactctggactctggaccctgcctcaggaaattgtcacttgagtaagtggcagctttaaaaaccaac

SEQ ID NO: 53649 - DNA, 308 bp, Mus musculus
  source 1..308: mol_type = other DNA
agagttagtgctaaaactctggggttgccttgatggctccggagacctgtaggtctgagaattctcacatagcttgcttcagatctgtctgtctgtctgtctacatttggcgcaatgtataaacgtgtttaagacaagggatagccccaatttgcagggccgctctctgccaacttcgcagaggtctggacgcagagcccgccagttctgtagggagcgctctatctgcccagttcctgcagccgcaggggtcgcccaaacgtcgcagagggggggacgcagcacgtgggcggcgagggcttcccgcg

SEQ ID NO: 53650 - DNA, 317 bp, Mus musculus
  source 1..317: mol_type = other DNA
ccttgtcaactttgtttcaaacatctggccaaaggtaaaagactatgtccttttgtttctagaggtaacaagatgtaacaatgtaacagtgatgtaactcattagcatataatatgagtttaaaaatgcacttgaatttgccaatattcctggaagctactcgaaggaatagttgggtacaaagcaattcttcctaaggaagatgtgttgctcaataagagtcattgttcctatggtccaaagtagccccagtttccatttgtattggggacaaaagtaaaatcttcccaaggcatgttgagaacttcctgctggtt

SEQ ID NO: 53651 - DNA, 353 bp, Mus musculus
  source 1..353: mol_type = other DNA
tcacatagcttgcttcagatctgtctgtctgtctgtctacatttggcgcaatgtataaacgtgtttaagacaagggatagccccaatttgcagggccgctctctgccaacttcgcagaggtctggacgcagagcccgccagttctgtagggagcgctctatctgcccagttcctgcagccgcaggggtcgcccaaacgtcgcagagggggggacgcagcacgtgggcggcgagggcttcccgcgcgagcttcccgcgcgagcttctcccgcggcgggctccgtagcgcgcgttcccgctcgcccccagctttcccgggctgcaggcacagccccgtccggcccgcccgctcct

SEQ ID NO: 53652 - DNA, 482 bp, Mus musculus
  source 1..482: mol_type = other DNA
taagagaactcactacagggtaacatctatacggttttctttacggtttttttttaacttctcagaacttgatttataaaaataagaatcaagaatgtcttgaatgtctccatataatggttagaaagctattctggctctcgttcatgtggacaagtgtccatttacaagtccagacagtccctagtctacttagtgtgagactagtccatagactagaccataatcaggttacaaccgacagctgcccttattcgtgactcatgggtccatgcacagtgaacaaagttcaatctgcagacctccagagaggtcacggtagtccctcgtgggcacacctggcctggcagcagggggaccccgctgcagctgcctcctctctgcgccagcggacacttttgttgttgtcaacacaaaaccacaaaaaaaaaagagtctcctccgagggttgctttaccttctgctgtcccactgtcactgcc

SEQ ID NO: 53653 - DNA, 528 bp, Mus musculus
  source 1..528: mol_type = other DNA
gagccttgaggctactgacgtcaggtcacgtgtgtcgctgctcccctggagcacctcgggggctgtgggaggaccgcagggcacgaggaaggggaggacccgggagcggcccccaccccgacgccagcccctcacggtgctgggtgacggcgtccagcagggcgtactcgagcgaggtctgcgcgggcagcaggcccgagaggctcgcgccgcgcgctccgggagccgccatgttgcgcgagctcccgagggctccggggccgagggcgcgggtcggaccagcgtgcgccgccctcttgactcagagcggggcctggccagcccggccctgcgccaccccgccccttccaggttccgggccgccgcgaagcctggacgttcagatccagaggagctgggaacccattgcctttgaagcccggcagggaattcctttaaaatgcccatttgtgtgtcccactcttaaacggcagtgacagtgggacagcagaaggtaaagcaaccctcggaggagactctttttttttt

SEQ ID NO: 53654 - DNA, 365 bp, Mus musculus
  source 1..365: mol_type = other DNA
cctctgtagagtggagacaggcttgtgccttttctctggctagcctctgtagagtggagacaggcttgtgtcttttctctggctagcctctgtagagtggagacagacagtagtgtagcttcctagcctgcacatttgagattatcgaaagagaattgcttaatagattaatagatgaccaagcacatgatgctgtgcatgggtactcagtcaagctccaataggagcacctcttttccatgtctgtaactcaaggactggaaactatgagttactgcttcagtcagctcactgggtaatgggtttttgttgacaaatcatgacacacaaataaaactcttaaagttgttgatcaaatgtctttt

SEQ ID NO: 53655 - DNA, 535 bp, Mus musculus
  source 1..535: mol_type = other DNA
ctgcacttgaaggagagagcgagaacagcgcccagagagcctttctgacagatggctggccaggtcccctcgcgatcagggaagagccaggctgcctgatggcactccgagacgcctgtaaggttctcttatagctaccaggagcacaggaggcggcggggcgccgcagggggcgccgcagactcaggaaagggcgcgctcgctgcagcccgtgggtgctggctgcgtagtccgcccgcaatcttcgattggctgcgggagcctgacgcgcggccccgggggctggctgggggggtggggggggaggtgctgggtgttggagccgccggccccgcgcgctcagaaacatgctgaggtcccggcggctcttccagcagcgacagcggctccagcagcagcggcggcggcggcggcggagacagcgctcggctacggaggagaaggcgcccggcgtccatgcctccggccccgagccgcggctgccctgacctggccgcgacctccccgcgcgggccccgcagccccggctcctggg

SEQ ID NO: 53656 - DNA, 405 bp, Mus musculus
  source 1..405: mol_type = other DNA
tgaccctgacctgggttctgtgaggcccagaccctgggctgtatgccagtcataccctgtaacaggtagggactgagggatgctgggagaacctatcagccaggtccaatttgatatattaaataaccacaggtggttggttatctctgagttcacggaggcacgtgggtctctgttgtgccctgacttccacatatgtgccatggcacaaaataaaatctgagcattgcttcttaacattcaagaagtgtttctagagaaagctagaaattcctgtaaagctagaaattcctgggtgagcctgcaccaccaccaagcacctgcgggtgatcaatcagagcagctccgcaggctcggctgcactgggcgcgtgggtggggctgcgcgcacgtgggagtaaactgc

SEQ ID NO: 53657 - DNA, 405 bp, Mus musculus
  source 1..405: mol_type = other DNA
attgtaaaacgtactgtaatacattaccataatttgaggagggagttgtcattttctgattaaaaaaagaaattatgaaagtaatttaacagtaatatgcttttaacacatcttttctccggacagaggtggtttgcaaaaccaaccggatgggttacgcagcccaggcaggcttaggtcctctgcgtggagcacaagatgaagctcgcatgcccaagtcagctgctcctgcggacttggctcacccacattccttccgatagaaggcggggcctctagaaaccgcgaggactggaggcggcgcctcgaaacgcccgcctccaggtgcttaacgtcacgcggtccgcgccgcgctgattggctcgttcagggagccccgccccctcagctgtagccgcgccggct

SEQ ID NO: 53658 - DNA, 576 bp, Mus musculus
  source 1..576: mol_type = other DNA
cacatgtgatgatgcacctgcacacacaaacacaagtgtgaaaaatggaattcttgtatataacttgtagtctaggaaatttactagtttccaaatgtaattggggccccttaaacttaaggcctcagcattaagcctgcagatgttcaactcaggtgtggatgatctattttgtaaacttttccaatgagcacacaatatgtagttttgattaagtataaaaatgatttgacacctgccagaagggacaccgttgtttgttctgtgacaaatacctggcaacgatgccaaagtcaacatttcctcaagggccgcaccgcttgcagcggccaggtcgctcgtcgcgggtcgccgggcagggcgagggacgaggcgggcgcggttcccggccgaacgtccggatcctcacaggctgcatccgagcggcccgtcccgcctctgctgggagagaccaacaggtgccccacgtggctgcgagccgcagcgccccccgaacggagcccagcctacgccgcgggcagagcagctgtgcgctccgcgggtgggagcccacgccttccaacaactggggcgggg

SEQ ID NO: 53659 - DNA, 402 bp, Mus musculus
  source 1..402: mol_type = other DNA
cgggcgtggcggcgcacgccttgagttcgaggccagcctggtctacaaagataatctttggagaggatttagataacctcggacaggtgccatcttttcttgaagacctgaggaggctccgtgcacgatgtacagctaatccaggagggcccaggatgtgggcgcactggcttgatggatcaagcaggaggcgctctaggtccgtctccgacctacgggagctcgctgttcccggagtcttccccgggcgggacggggagccgtgaggaccagagcgctgattgtcctgaccggctgtggagatccctggcggggtccggggcgcggcggccactccgggaggtcgggcggcgagcgtgacttcactgggaggggccagcgctcagcgggggcgcggagccc

SEQ ID NO: 53660 - DNA, 241 bp, Mus musculus
  source 1..241: mol_type = other DNA
agcgaggctcctggctggaagatctgcagagacgggcgtggcggcgcacgccttgagttcgaggccagcctggtctacaaagataatctttggagaggatttagataacctcggacaggtgccatcttttcttgaagacctgaggaggctccgtgcacgatgtacagctaatccaggagggcccaggatgtgggcgcactggcttgatggatcaagcaggaggcgctctaggtccgtctcc

SEQ ID NO: 53661 - DNA, 209 bp, Mus musculus
  source 1..209: mol_type = other DNA
aaggatcctgtagcagcgtcgttcttcctggcctgttgagcgcgcgcaagactcaggattaagccttgctcttgtgagctgccttccaggaatctgtcaaggacagaaactcctgaggagccagctaggagatgaaggacattcatcatctgctgagatccactgaggtctgagcagctgcctggccacgtgaggacaggtctcttata

SEQ ID NO: 53662 - DNA, 316 bp, Mus musculus
  source 1..316: mol_type = other DNA
ctctaaggagggttcccaaaaggaagctccctggtgagccagtgacctcacttcctgtcacaggttcatctgcgacttctgaagaatgccttaattaaaaatgagataatatgtataaacctacacatgcatgcatgcatatgcgcgcacacacagcaggtaagcttgctgctacacatgtgctaggacacccttagacacgagcgcgcacgcacgcgcgcgcacacacacacataaactgtgtatacattagctctatatcttgcaagcagccacttggatgagaaagtttgcaagctgtgccataaatttctct

SEQ ID NO: 53663 - DNA, 423 bp, Mus musculus
  source 1..423: mol_type = other DNA
atgacaggatcataaatttctgaattgccgaacctattcggtgaatctcgttttcatcaggagatttgggaagaacttccgcagaaagttctttgttcaggcagcagacttctgagtcttctcatttctgtcctgatgatacacagaaaggggcctttctagagctggactggccttgatgagggtcatagctggtcctgcttatgaacagccaaagactgcttcaggtcaggtgaaattctttctccactgaaggactagtctggaaagcattcactattatcatcatcatcagagactcgggagctccgcctggcgccgtggccaagcgggcagtgagtccccagcagcctctggacccgagtgggcccggcccacgggcaccaggagggggaaccggccccgcccagccggccttagctg

SEQ ID NO: 53664 - DNA, 765 bp, Mus musculus
  source 1..765: mol_type = other DNA
agcggttgcaggctgcgccaagagcctccagggtgagctgggcgatcgcggacccgcaaactcccgcagatcgatcaccgaggtccggccgaggtgggccgctgggcccgagctggcagagccggtaccggtgtggaccgggccccagggtccccgccgctcctctccagcaccgccgttcttttgtcttgcgcggcgctggccacgtagccccggaggttaacggccaggaggcctcgggagccgcccggtccccggctggagagcagaggccccgggggtgcccaggcctcgccgcagcctccctcccctgctgcaggatgcttggagaacatcctgtcccgggactgcagcagcttctcccgggacgacctggagagctcctcgatgcgccgccgccgcccctgctgcggctgcccgggccgctccagagtgaaggccggtgcgggcgggcccgggcggggagcggagggcggaggccgggcgggaggcgcggcggctctgatcggaggacgcggggccgcggcgggcggctccgaggtcgttcggctgcaatcggggcaccgcggagctcagcggcggcgacgcggacacggtggcaggagctcgggctcttccggctgccgtgcccgccgcggcctgcaggggacgctgatgcggcccggggaagcccaggtctccgctgccggcgtcgctggacgcggggcggggcgcgcagaggccagggcggggagggcggggccagcagggcggggccgacttggc

SEQ ID NO: 53665 - DNA, 487 bp, Mus musculus
  source 1..487: mol_type = other DNA
cctgtgatccccgggatccaaacaggcttctcaaccctgctcagagtttatactatcaataggtatttttcatccatgttaatgagaaatctacttcaccagcttgaaacaaagttcttcagattttcagaagttgcatcaaccatcttaaaatggaggaagcctccagcccagggctcattaacttgaggcttcatatcttcccacctgcattggatgcggtcgaatcccttgccctacgtatggtacgcaagcgcagcgtcaacacgtcgctgccaaatcctcacactgctctctggtcaccgagagacgagtgccagcaccgccgggtgcgccacgccaggcccgccctccctcgccaagtcggccccgccctgctggccccgccctccccgccctggcctctgcgcgccccgccccgcgtccagcgacgccggcagcggagacctgggcttccccgggccgcatcagcgtcccctgcaggccg

SEQ ID NO: 53666 - DNA, 288 bp, Mus musculus
  source 1..288: mol_type = other DNA
aaccacacttccatttaatgcatttggggaagaagtaaaaggatttttttttcctctcttagaggaagagtttaaatattaatttaaaccataggcacacattagtcaaacaatgaattttgattgttgacgaatggatcaaccatatatagtttttgattcctataaaggaatagaaactccaaaagaacattaacattttttttagaactgtcaaaaactgcagtcaaaaattcactacctcaaatacacaaattaggtgtttgcgttggatagtttccattggcc

SEQ ID NO: 53667 - DNA, 673 bp, Mus musculus
  source 1..673: mol_type = other DNA
acttctgcttttctgaaggaaaaaaaaaagccaagagccgccgcggctgaggtcgccccacgggagcagcttcgcgccccatgcagcgtggtcagaccgcggtgcagactttgctggctgcacatgctttgtgtgtagttgggagtttttaagaaaaaaaaaggggcgggcgcctcacttttgcagcccgcggaggccccgaggtcggagtgggtttctcctccgtgggctccgcggcgcgggccacacctggggacgcactcccagcggtgcccgccggccgggtgggcgcgcgggggagtcccaggtccccgtcaggggccgggcgagaccaccgcgcccggaccgagggggggggagtggccacgagagtgcgtacgcacaaggctgcggggacgtctctccgcagtttgggctgcgaccgcggccacagcaactgtgtctggcaggctgctgcggtatctcaggctagcaggagtaccgccgggtaccgacagccgccctcccctccccgcgtgctcctgttggacgcgcccatctcgggggctcccgcgcggccccgccctcccgggcgagcctcggcattcggcgcggggcgcgggcgaggcggggccgtgcgggtcccctcccccttcccgcccggtcccctccccctcgggtcccctccggagcg

SEQ ID NO: 53668 - DNA, 276 bp, Mus musculus
  source 1..276: mol_type = other DNA
tttaaatttcatcttcatgtcatatttaatggagaggaattaattcatgtgttaaagaatgggcatgaatcaggataagattctatcattgattggtaaacaattgctttcacaacaagctgcttctgaagtaacatcaaggagctcttgtcttttggcctagtggcgaggcccattggacttgcaaactttatatgccccagtactgcttccctttggaccccttataaaggatggcaagttcacaggtctcagatgtggcagctggcaagtcag

SEQ ID NO: 53669 - DNA, 276 bp, Mus musculus
  source 1..276: mol_type = other DNA
ggttacaaccagttttataactaaaatgaccagtgagactgcacctgccctagtaggccatgctaagctgctgatggtggcgttccaaccacagcagtttttgtagctgaagtggctgctcctcaaagactaaaggagtactatttgtaccgtggtacctgatggcccggttcagctcactgggccagcatggtgacgtcacggcttcacacaacaccctgtcaccgtgtctgcacagctatggacagacagctgtgagagggtatctaagaccta

SEQ ID NO: 53670 - DNA, 279 bp, Mus musculus
  source 1..279: mol_type = other DNA
cagctgccaactttggggtggtgcggggctgcacctgccctcttgccggactgcctgggaagagaggctcgaacgctagtgatcgagccagagagccagggagggcggccaacttcccggagccggagcagggtcttggtccagcggggttggctaagaagccttcgccaccgaggctccgactccgggcagcgccagctagcttccggcgcttgctctgaaagcagctttgaacgttgggagccctagcgctgctctcggacccgagtgggggtagcg

SEQ ID NO: 53671 - DNA, 687 bp, Mus musculus
  source 1..687: mol_type = other DNA
gcaaacaaacaataaatattgaattacataataattattatatcaaaacacaagtaacaaaataatgttattattccttattcatgggacttcaaggttgtaaataagaagttcttgtcaagaagggctgatagtgagaaaattttcatcaatacttgcttctgaatagctccaagtaattatttcaaatttcagtgtgtattctgatagttcaaacattaaactttatgcagacatgaccagatgaaaattaaggtagaaatttagaataggttagaatttataactgattatattgtggcattaatgggctattaattaagcctattctatgtgacaaaaaatttcatttaccttattttacataatttaaaacacattcaaactaaaagttactttaaaaagtctagccagtgtcagttttacatttataataaagtcaaatatttattacaatgtcaatattttgagctaccgaaactgaaaatattttttaattaaaaaaagaagaaagaaataaaagccccaaaggtgcctttcacatttaagccttaattagcaaccactttgtgcagatattgaagtgttaatattaccaaggcttgattacatgattaagcataagactttgcaaaagtttatatttagaatcgcagaccctgcagactggccccaccaggctcccgt

SEQ ID NO: 53672 - DNA, 312 bp, Mus musculus
  source 1..312: mol_type = other DNA
tgagggcccctgaggaacctgagcttcagaatacaattggttttatttcctgcctcagcagtgctcaggacacaagtggagagcgcagggttcaacacttaacttgaaagctctgagagcttggacccaaccttgccacgttggatctggcagtaggaatgcccccacccccccagttttgagcgggctgattcagaccaggtttaggccacagccagctagcccacctaggcttcctccaaggagccactgcctgctgagaggctgaacctgagatcctgatatagctatcagatcttggcaaagtcgggt

SEQ ID NO: 53673 - DNA, 290 bp, Mus musculus
  source 1..290: mol_type = other DNA
atatctgatcgacagtggaccattgcatgttattcttgagaaattgtcaagtaccttagactatcaacagaagcactctgaggggtgctccctcctttctgtgtgactattcaaatctgtgggaattgaccacacacaaaggcaaataatgtatttctctttcatagtttccaatggttagatatgtgtgacccagtatgtaaataaagtcagaagctaatttttaaattgataaagtaatttaaaaaaaaaaaaagaagcagtgcacagcacaccgatctgagattaaa

SEQ ID NO: 53674 - DNA, 328 bp, Mus musculus
  source 1..328: mol_type = other DNA
gaaaattcaattttaatttttccattttatttgcaatttcatcctctttttaatttatttattattattattattataagacagaatacatgatgattggttctctcctgtcacgtgacttctggggatctgtgtgtgtgtgtgtgtgagagagagagagagagagtcacaggtgtgcacaccacatgtgcccttcaatgttattcttgaataatgagttagcagtgtagacttgtaacacatgtggctgacagagtcggtcttccagacagctgttgtgaaacctgtgcccacgggcacacagggcagatctgagattagaaaaaag

SEQ ID NO: 53675 - DNA, 372 bp, Mus musculus
  source 1..372: mol_type = other DNA
gggctcctgaaccctaccgctgcagctgctttaagcactgtgtttcagattgattcactgccatcagagagaaaactctcttaacagatgtttcccagagagagttcatgttggaaacagaaaccaaggtctcactaaagcactctgtctttgagccacaacccctggcaggcctggggctcccactctgcccatctcagtgcagctgcatgcagactgagacctgcacactgcttcagacacacaaggaaaagctacagggttttttttttttttttttttcaagcatgctttcatcatcccaggcttgtgggaagatctgcctgatgtgtaaatacacacgcacactgtttgcttggactgcagtccaaa

SEQ ID NO: 53676 - DNA, 338 bp, Mus musculus
  source 1..338: mol_type = other DNA
gccacacagctacctgtgctgtcttctgtccccttggtcagagactggaatcaagggccaatgccaacttgaaacacggcagggtggctctgaaggaaagaaaacatttccacttcttatctcacaggtgctttgcaaatggcaaagattgtttctaaacaaacctggttggaaacaaacactgaggctgaggactaagttgtgtatcttcacaaatactccttttcattgtttatgataacttatttcttcaatggagttcaaaaaagaaaacttgtttataaagggtcatggctcataacgaaggtcgggtggtgctgccacgggaggcctcagca

SEQ ID NO: 53677 - DNA, 335 bp, Mus musculus
  source 1..335: mol_type = other DNA
agtgtccaggagaggtatggtcctgtactcgccagggatagacgggcactgaaagcccttcggcttctgtcgagccaacagccaggccggtcaaaatgaatggcccctctcttcggaaaccaaatagacacggtggcctttatttcctattgctggccctcagatggcagggcccaactacactggccggccggcctggccctgccttccccccccacccccggtgggaatgaggagctcaagctacagcttgttggctgcttagcggctgacccctggttttcatgtaaggggcggggccagctgcccagccagggtgatctggaagagcgcag

SEQ ID NO: 53678 - DNA, 446 bp, Mus musculus
  source 1..446: mol_type = other DNA
ctaatgagatctttaccaggccttatgtgtgtgtgtgtgtgtgagagagagagagagagacagtcaaccatggaagttttgaattattaatgtcctattttaatggggggtgctgggcctcagccctgcacaagttgtggcctggctcccggctgcaccagggtctcgctcctctgggacctaggagcagaggccattgagggtctggcgggaactccagagcttgaaatccgaccggatcagctgcagagaccagccaccgcccaagctgagtcctggtgcgctaatgacagcacggggtgtggcctcggctgggcggcgaccagcggtttcagagcttgtgggaggagccaactccctccttctccagggccttggctccgtggggcgggcccgggaggagcgtggggaggagcccgggctgcggcggcagcgtcagagtggtg

SEQ ID NO: 53679 - DNA, 333 bp, Mus musculus
  source 1..333: mol_type = other DNA
acagtacatttatggaaaacaactgttcccaaacaacctgctttctgttgcacagaaataagttctatcattgcgtctggtacctaactgtcacagtaaaccagcccgctgctacagaccatgacccaaggactttctctcagtaatctcccccaaagggagctttctgagagagagcatcacgaggcgtgcagcaagcacagtgcgtgggtggaagggatgcatgcccaggacctccacggctcaggaagggcaccctgggctcttgcccctcgttaactgcaagagttgaagtggcgggtagcctcgcgagatctaggggtcgtgatctcg

SEQ ID NO: 53680 - DNA, 519 bp, Mus musculus
  source 1..519: mol_type = other DNA
aagcctgcctagatatgtttgcccaggtctaccccagagttgggtgtaggcaaggactgtcttcagtccttacacaggaggctccctgtcatgcaacaaagtgaccttggccctgcaggcctggtgaggcacttggaggcagggcccaggttctgactctggcctgcaaacatgcacttgcttggtggacaggtgcatggtttttccagccctggctccaatgagcagtgactgagaactaggataggagcctggtctgctcagatccgctgtccagctctagggtggcggacctggggaacccgggtcgagtctccatggtgcgcgcctcgggtggaaagcctggcgcagcggcggccccacctgggaggatcgcaggcgccccagggccgtgacacttcacccgcctccagcggcccacgcccctaccgggccaggcgcccagacccgcccgccgcaggtggggcagccagggcccgcgaggcgtgggatgatctcaccgcgtgcggcgcgccagga

SEQ ID NO: 53681 - DNA, 335 bp, Mus musculus
  source 1..335: mol_type = other DNA
aagtggctaagaacacagctctgacccctctgaccctatagaagggtgtgtgtgtgtgtgtgtctactgtctatcacagaaacattccttttaacaaggcttcggatgctctcaactctgagagctgcattctgaccctggatcagtctatatagagtgggctgagcattctggccagcctgagcagcagacgtccccagaatctgatagggtgggctcgtgaccgcagccccagctgcggcccagaggcagctctgggtgggcggaggccagtatcctagctcccccctctccgccccctctcagcgctgtccgtgacgtcagagccggactgg

SEQ ID NO: 53682 - DNA, 440 bp, Mus musculus
  source 1..440: mol_type = other DNA
tgggccaccagagaattggcctggccaggcataacagcactgagtgaggattcagagctggaagtcactccagagtgtgtcaagagactccacagtggtttttggtcaatctcagataaaagcagcttgcatctggccgttccaaatgatttttacctagtttccctttctacaaaatgggaataatagcaattgcgaaataccaaagataactaaagttattttcagaaaagtcaagtatgagagatatgtcttcctatttccacctgggtggagcccaggaacctgagcatcaggagacccagctctgggtcttctcttctcttctgagaagtatcatgtgtgtaatgtttttattataaaaacaatatacaactggcattcataaagccccggattagattctttcaaggtcatccttgacttgcatggtgaggttg

SEQ ID NO: 53683 - DNA, 418 bp, Mus musculus
  source 1..418: mol_type = other DNA
gtgggcggccagggcgtgcggcggcggcaccgggtgcaccggcacggcggggttgggcgggtgcgagaccgcctcggcgaacaccaagtccgggttggagtagacgcccctgccggcggcggcggcggcggcggccgagtggaagccgtgccgcggacggatgggatcctcggagcgcgaggcagctgtccttggccaccagcgactcgatggtgaagcagcgcttgggcgccggctgaaacatgctgcgccgaggagcgggcgcgctgggctccctgctcccggcgaccgcggcgcgctgcctccgccgcccgctgcccgcggcgaggaccgaggagaatcttccagggggaggcaaaaaaaaagttttctctcctttgcaaaaggcgggcagggcgccctggcaaactgggaaccc

SEQ ID NO: 53684 - DNA, 544 bp, Mus musculus
  source 1..544: mol_type = other DNA
ggtctacacagtgaattccaggacagccagggctacacagagaaaccctccgtgttattatgccaagtagaaaccaaggacttaggatccccgctaactcctctcacttaaattgaaaggctagcgatggcaatccctgatgcagtctgtcctctggccggctcgggcagtgtcccaaccgcctgtgctcaggctctctgcggcgctgccctgcaggggaggcagcaacacactgaggggggcggtcgccacagaggtatccggcaggacccacggccgccgcgggggatgggcgcggaataacggacggccgcgccgggccccgtcagcccgaccgcgccctccggagacgacggacgcacggatcgccgcgccgccggcggcaggaatgcaggggcgtggggggagcggcgctggaagcgcgccgagaggtgggaaaggacccgcgtccaagcgcgccggggcgcccggcgccgggggcgcgcacgctctgacgtcacgcgccgctcgcccaatgagcgcaggctctgtggggaggcgccgt

SEQ ID NO: 53685 - DNA, 491 bp, Mus musculus
  source 1..491: mol_type = other DNA
cacatttcccagaaagagctgttttggggacagagctggaagtccactgccacggtacaggcgcagctggcccctcaggtttgaactcagccgggacgcgtggaccctggaacctcgaagctacgcttggttggaggggtgggaggaccccccccctcgagcgcctaggaaacctcgggagttttgctagcgggttagcccttgcccggaaccagtccccgctcgccgggcgcccgaagccatctcagtgacccgggcgcgggcctccaggggacaaccgcagccagcgccgcaggcttaggatccaggggtccgcagcaaaggcagcgcagccccgagactctgcagggacccgggtgccccggtgggagcgcccggagcgcagggccaccaagaggtcggcggccgggcgggcggctggaggcacagccggggcagtagcgccgactccgttccattctgggcccggatccaggcctccgggttcccag

SEQ ID NO: 53686 - DNA, 331 bp, Mus musculus
  source 1..331: mol_type = other DNA
cttggagagctgttgtctgtctgcaaagttctccctgagcagctgccagagacagtactcctgtcctctttattaagcaagggaatctttattaagcaagagaatctttattaagcttttttcctcttcaagacgatgcagatttctgccttccaagatggaaaccggttagggcccagtgccgcctcccagaaccccttgtcggcctctgcgggctcacagttccccagcccgctgcaaccgacaggttggaccagcgcgcgcatcccagcctccgcgtcccgcaccgcgcgccccgtcgtcaaggcaaccagggaggcgctgacccccg

SEQ ID NO: 53687 - DNA, 690 bp, Mus musculus
  source 1..690: mol_type = other DNA
tcaaaggaggcctcctccttccagatgtagaatacttcgttttctctgcgcagagttcagaagcgcaggcagagcccctcccgcggggagagccccgtaccctgatcactgcatccttaagagcacttcagtgagctgggcagtcagggctgccgcgaggtccctaagggctgctgtcaggaggaccggtagggaggccgccgccgctgctggggtccctttcttccgtagaagcacaggggcccacatccgcgccttccgggcctccgcgcgcagccccgcgccccgcttcgccgctatcctgaaacctgcgcccctagggcccggcctccgccccgcgcggcccggctcctcctccgacccggctgatacgaaccgtcgacggccgtggggcctggctccctccgcccgcccgcgcggcctcgcctcggctcctcccccccaagagtggcgcaggcctgggcgagcggggcggaagcggccgacctggaccggtgtcggagggacgcggagcgcgggtggcaaaccgaggccgggcggtgtcaccgggtgaggcctggccagcaacccgcggctcctagcgcccggcgcgcggcggccgcgccacttccgggttggccgtccgggggtcagcgcctccctggttgccttgacgacggggcgcgcggtgcgggacgcggaggctgggat

SEQ ID NO: 53688 - DNA, 207 bp, Mus musculus
  source 1..207: mol_type = other DNA
aaacatatatgtgttctaatgcatgtgagtctcctgtctgcatccacagtgctggctgccatgcctggttactgagtagtttcttatataaccattggaagcatttctgaagtggtcctggtgaaaattccgttcttccttgctcctcttagcagaggcgtttggctgggcgaccatagagccagaacggccgcagccgattggctg

SEQ ID NO: 53689 - DNA, 375 bp, Mus musculus
  source 1..375: mol_type = other DNA
catatttgttctacatcaagaaatgatgaactggcgacatgatgtcaagaaagagaagcagactccttcaagttgccctctgaaaatagaaaaaaaaatttaaattcaactactgaagtcccagagctatgtgtaggtctaacatatctttgacattctgtacaatgtgaaatgtaatagaatgttcttttaccatttaagaagcttaagtaaagaaaacttttgttgaagttcagtactaaataggtagatttagttttctgacttaataaagatttaaaatgccacgttaaataacctattagaaaagtagttttcattggtgcctgacacaagtgtgaaactgtgctgtgtcacgggaaaccctttctgaac

SEQ ID NO: 53690 - DNA, 360 bp, Mus musculus
  source 1..360: mol_type = other DNA
agtgctaagttagctggactgcagaccatcccaataatttctcttaatacatagagacattccataagttctgtgactctagagaaccctaatagtttctaactgcacagtggtcagagaatgtggttatgtctcctcagacatgcagagacacttgcttagagacacagtatgtttatcttttgtaaatgtttcacatactctgggaaggaatgtatattgtgcaatttctgaatgagtcgtgggggaccctcactccactctcgggcacacccagactagttgtggcaacaagttagagaatgcgcgtgcgcagaccaaagtcctttatcaggccggccgctgggtgcattcgccttg

SEQ ID NO: 53691 - DNA, 390 bp, Mus musculus
  source 1..390: mol_type = other DNA
tccagaagagtcctcgcagggaagagcaagactacttctttccctcctcagggttttaccaaaaagagaaaatgttatctgtttcaaagcattgaatatgctgtttttctcaaagtttgtgggaggacttcaccctgtggaaagtgctccagagcgctgtgccaactgaagtcactgggtctttagctgggctctgatgggagctagcgcctagttttcttgctgatgatgataaaaaggaaaagtggatgcaagtgcatcccagttgcttacccaagctgggttaccggctgaggtctccacgctagcgccgcttccccgcgtcccgaccggcgcccgcggagtcaggtccgcagccattgagcgccagggcccgaggcggcgcctcac

SEQ ID NO: 53692 - DNA, 470 bp, Mus musculus
  source 1..470: mol_type = other DNA
gaattaatgtcccatactattgtaaaatatgtaataaacttacaataatttattcttttcttccggagcgctcagccacaataattcgacgcggtttaaatggctttcaagctctaagcatagtaattaatctgtgaacactacatttgttaggtagcaataaaagacatggcttgcaataagccatttcttcaccaacacatttcttatatttgtttgtatgtaaaaatcgatgacactcgcgtattttcaaatatacaagccagaggataccaagtcaatcaagtgactggactggccctttcccactctgtgtccgcggggggcagaggtggtcggagctcgcgctgctcggcacccagcgccacgtcagcccgcgctcgagacgccagcgcgcctgcgcgcggagaaaggcggcgcaaaggcctgcctcctacatccggggctcgggcggcggcgctgccgccgcg

SEQ ID NO: 53693 - DNA, 369 bp, Mus musculus
  source 1..369: mol_type = other DNA
tgtgttgagctacaccacaaatagaaacaggttttggttgttgttgttgttgttgttgttttttctagtaaataatacaatcttggagatcacagtgtgatcaaatgtcctcttattataaatgaattctgtattttctaatgtattgaaatcctgactttcaaggtcatgactttaggaagttgagtctgggaccctgacttgacccctagcctaagaacagggccaaggaatggattagatttgctgtataaaccctgtctttgaggctcatcatcgcctgccagaacatattaggtctccaattatttgtctttgtaatcagtgaacggacacttggcggcacctgtagtgcctgctgcaccctgc

SEQ ID NO: 53694 - DNA, 446 bp, Mus musculus
  source 1..446: mol_type = other DNA
aaaacctctcttatcttaaaaaaaataagataataagagtttattctggagctattttaagcctgggaacacaggtttaggttaaatcttacattcccgtgtgaaagccatttcacaaagtttgttatagtttacataaggtcaagatgctatttgatgccattgccaaatcatcaataaattctaaaaggttttatctgttgtcatgaggccagaacagtactgaaatttttgtcaacaaaatcagtttctgaactcctttaaccggttaaaacctaaccggtctggctgagagtttggtacactctactcagatccaactttttcaataatatacacttttggaaatctcaatactttttaataaatggcatgataattttatttttcactgcaccatgaaaattatgtacggtagaaaatctcttgcatcagttacccccaaa

SEQ ID NO: 53695 - DNA, 463 bp, Mus musculus
  source 1..463: mol_type = other DNA
caaaactcggactttcagcaaataactgtatctagctggaactttgccttctatttatactgttataagtagaagtttaactatttcctacttaacattaagattatttgcactttaaaatgagctagcataaagaaaatattatttagataatatgcagatgtgagaaactatattagtacttggtatctgcgttaacaaataaattgatttaaaatgtgtcccaattatcccaattttgagatgtccctaagtcgcttagcttattaaagaactcagataactaagtttgttccactgaattctttctttctactactctaaattaaatgtcaataagtgtctacttcctaaattgaatttgatctttatacgtcggtggaatcagggaaatttccccctgagctggaaggacctcgctgaggccccgccctcatagggagcacacccggcgtgctccggc

SEQ ID NO: 53696 - DNA, 387 bp, Mus musculus
  source 1..387: mol_type = other DNA
tccataaggagatgagatgtgacaccctcttctgatgtgtctgaagacagctaaagtgtacttacatataactttctttttgagaacttaactcttcttgtagacaagtgagggactatcactaactgttagaaccagcactagtcttccggaaaggcccagaggaggcaaaggcctcattgttccctgggacctggcagccccgcccccagctcagctaatttcccgaggagctgggaccagatctggagtccgacaagcctggaatttgaatgccttttcatgctggttgagactacaatggttataatgaaagctctgtgcgtggggatcccgagagtcccaggcgcctgcctcccatagacgcgccgtcgccagggggcgcgc

SEQ ID NO: 53697 - DNA, 264 bp, Mus musculus
  source 1..264: mol_type = other DNA
tttgtttttattatcaaccttatacaagtggagctcatcttcaaagagattatacctcaaccttattggctaagcatattctgggactttcccgagggtcaggtaactatcagtaccttaccaggtgaaaaatagctgctgcagtttacctaaacatcttattatcttatttcctaaagtgcctccggagtactcctcccgtgctactgaaatgtacatctctgcacatctggaatggccaatcagaggcttcagatggacctg

SEQ ID NO: 53698 - DNA, 297 bp, Mus musculus
  source 1..297: mol_type = other DNA
ttggactgcagactacacgaaatagattggaagcctacttcatatctgtttgatctgtataagcagaaaaattccaatctcggccagtgatccaatttccagattccctcgaggaagcaccgactcacagtaggtccagaagttattggcagaattctcatatcagtttgactatatctggaatgaactcaatgtagaattgatcctgatctggatctgacctggaagagctctgagttcaaggtcatctgggattaaaggtgtggtggcacacacctttaatctggctacaccttc

SEQ ID NO: 53699 - DNA, 649 bp, Mus musculus
  source 1..649: mol_type = other DNA
gtttttaaaactaataaaatttatcttaaaacatacaactcagtattgatatttttaaagtcattaaaataattcataatagtttaaatgcctcttaaatgtacatgacatcttcgtacacactctaccagtttttaaaatctgtttggaacattaaacacgacagaaaatctctcatgagtcctctgtggacagaaataagcatccaccaggcccgcctgaccctgggctgtcttggggggtcctccagatttggttttccccaatttggaaattaacgaacctaaggatcacctgttgaacctaacccttatcaatatgatcaacaggatcaagaccactgtgtaagcgcgtgctcacatgtgtggtcacactgtgtgcatcaatgtcacactgtgctgagtggtcacactgtgtccacaaggggtcagatgcagtgactgacgtcacaccgtgtgtagccaggctgtgtgcgtggcagtgtgacgcgcccgaacagccacacagtaggctcacgtcccggtgtgctgccccactgcacgaggttgcatggcgtcacacagcgggccaaccgcctggcgcgacactcggaccccgcccccggtgacgtcaccgggcccccccctctaggtttcccaacctgcagatg

SEQ ID NO: 53700 - DNA, 491 bp, Mus musculus
  source 1..491: mol_type = other DNA
tcacagaccatagactttgctggccaggctctgggaatggattgccagcacagaggaataaaaagaaatatttaaacatttgacttggcttcttacagattgcaatttattaacagtaaggagtccatataaagttaatatgtaaatcatatgcaagttaaacaaataactagatttataaggaacttttagaaatatatatatataggcaaagcatacacagaaattgttgacataggcatacaactacttgcatgaaatacttctcattaatcctaatcaaaagaggctaacaataaaattagcaataacaatgtttactctttatattggcaaaagcagttagtaagtgattatctcaaatactacagacatttgagtgagggttggaacggcctggttgttctctttaaggaaaagaaaatttgaaaaactaggtgaactaggttctccagtttgatggaggtctgtgctcactagaatctgtagta

SEQ ID NO: 53701 - DNA, 503 bp, Mus musculus
  source 1..503: mol_type = other DNA
tcacagaccatagactttgctggccaggctctgggaatggattgccagcacagaggaataaaaagaaatatttaaacattagacttggcttcttacagattgcaatttattaacagtaaggagtccatataaagttaatatgtaaacatatgcaagttaaacaaataactagatttataaggaacttttagaaatatatatatatatatatatatatatataggcaaagcatacacagaaattgttgatataggcatacaactacttgcatgaaatacttctcattaatcctaatcaaaagaggctaacaataaaattagcaataacaatgtttactgtttatattggcaaaagcagttagtaagtgattatctcaaatactacagacatttgagtgagggttggaacggcctggttgttctctttaaggaaaagaaaaaaaactaggtgaacgaggttctccagtttgatggaggtcattgtgctcatctggtcagaatctg

SEQ ID NO: 53702 - DNA, 450 bp, Mus musculus
  source 1..450: mol_type = other DNA
ttcattgacatggaaaatgtattttctggatacccccaaacaatttacaaacaatacttatgcatgaataattctattttcataaaactaagaaatatgtataaatgtccagtctacaaagatataattgatctttcccagtattagattgtttatttttctgtttcgggttacgaaaaacaatagtcctggtgtagtaatttaaaatgtgtataaatattaaactttaaaatccgttcaagtcagttaattcatcaactgccttggtgcaagacaacgggtgtttgccgaacattttaaatccaagacaatgtacttcagcgcctttgaactcaggatgttgccggtaattcctcacaccagaaggcctcctccggctcagcaggatgcattgccaggtggagggctgagagctgaccaatcagaggccagaatttggccaatcccagc

SEQ ID NO: 53703 - DNA, 465 bp, Mus musculus
  source 1..465: mol_type = other DNA
ctgccccagaaacagcttgcaatgacaaagattcttctggcaagaagctgagtgtgaggcccgggcctcgacccctctgcttactctcagggaggacctggccccctctgcctccaggtctggctgagacccacacgtggtgaggacccgtgcagcacagttgtgtgcacctccccagagcactggcagcaagcagcttcccagtgccagcggtgcggggcgcctgcgcagtgggccggcggcgtcgcgctttgcgggagtcgggagacccccgcctccgcgcctccgcccctcgccctccgccgcgcgcgcgcacgcgggcccggccacgcgcgcgcacgcgcctcacctcgctcaacccctggcgcagcagcggcggcggcggcggcggcggcggcagagcgggcgagcgcgcgcgagatcgcggcgatccggagggcggggaccgcgcacggtccactccgg

SEQ ID NO: 53704 - DNA, 640 bp, Mus musculus
  source 1..640: mol_type = other DNA
ctgccccagaaacagcttgcaatgacaaagattcttctggcaagaagctgagtgtgaggcccgggcctcgacccctctgcttactctcagggaggacctggccccctctgcctccaggtctggctgagacccacacgtggtgaggacccgtgcagcacagttgtgtgcacctccccagagcactggcagcaagcagcttcccagtgccagcggtgcggggcgcctgcgcagtgggccggcggcgtcgcgctttgcgggagtcgggagacccccgcctccgcgcctccgcccctcgccctccgccgcgcgcgcgcacgcgggcccggccacgcgcgcgcacgcgcctcacctcgctcaacccctggcgcagcagcggcggcggcggcggcggcggcggcagagcgggcgagcgcgcgcgagatcgcggcgatccggagggcggggaccgcgcacggtccactccggggctgtgcggaggcgcgggctctgggctcccggctccgggcggcggaagcggcgcctccaatcaggcggcgggctcgcgaccctcggcgcgcccggccggtgccgcccgccccgcggactgactgacgcgccggctcgcccccgcccccgcgcccgcccgcccgcccgcccccgc

SEQ ID NO: 53705 - DNA, 231 bp, Mus musculus
  source 1..231: mol_type = other DNA
aaggcacactattaattggccagcttatcccatctcccagctagcttgtggctgagcctaactagtgtgtacagcagtctacatgcacaaccccccatgctcggcgctggcgagacaagctgcctgagagtctccagctaggcggagcggggcggggcggcgcggcgcggcgcaggaggacgactgagctgctgggggcggaggctccgtagcccccgcggaaaaggagcc

SEQ ID NO: 53706 - DNA, 316 bp, Mus musculus
  source 1..316: mol_type = other DNA
gataaaatcttacaatatagtctggctggctacaatttgctcttatcagtgcactgggattatgcaaaactaagctgtctgaaatgctagctgattaagcttcttcatgatatagttcatacgtagagtatacctgtgcacacacatgtggtatgaacgtcaattgtcatctagatatgaatgttatctcattgacaacattctactctttgttagaggggccttttacttccttatagaagggcaattacctgtaaatcgtgagtcacaaaatgggactttttaatctacagaaacacacaaagtgtaagacttt

SEQ ID NO: 53707 - DNA, 383 bp, Mus musculus
  source 1..383: mol_type = other DNA
attctgatacctgggcctgggcttagaaatataacaaatttctgtatctgtaggatattataataatcatcaggctcagagaaaattgatggaacatccagggatgttattgctaataagctgcttttctagaatttaagttttttttttcttctggaaatgaacagatgctcagttgcatattagaagtaaaagagtatttataaacttttgtatctcagaagaacctttaccttgaaaaatgtcttagtccaaaaatgagctatattgccatttttgctgagcctcactaagctctcctttcctggggccctgaatggctgggtggggtcaacccagtccaggaagtgcaggacgtgtatttttaaaattctttttagaca

SEQ ID NO: 53708 - DNA, 422 bp, Mus musculus
  source 1..422: mol_type = other DNA
ctcatgcgccccgggggggggggggggggcatgcactctacccactgagctaagttttgaaacagaggcttgctatgtctgaggctcaaaggaattgagacttcaggtatgtttttttctttaattatagtgtgtacatatgaaaggacacacaacacatatgtgtattttttaatatacaatacatacatgcgtgctttaaagagtaattgaagatggtcacttgttaccatatctggaaaactgaccctaaaatttaggcttgccttgtgagatttaaattaatttttatattattttattttatttttatttttatcactagtggtttatttaaaatgtagtaatttaaaaatcgtagtaattctaaagtttctggatgttaggtcatgtgatctcatcggtgacatcatactctgacc

SEQ ID NO: 53709 - DNA, 493 bp, Mus musculus
  source 1..493: mol_type = other DNA
tcagtaactagcttcagtatctctaaacaatttatattttttaatttataggggaattgttaagggaaatgtaaaatccctctctagataggtagaaaattataactacttttgacagtgaagaaatgtaattgcattataatcacaaataaattgaagtttagaccatcaataaggcaataaactacgcggcttggcaagcccgctcagtcacttttattattcaagataatatcacaacttattctttgtaattttaaggtagttaaaacaactattattttattctgaaattctgatttgaatccacttcactactggagttacatcgccagaggcttaacctccattttaaaattgggggctggcacgcgctagttttatttcttctagactctggagattcagacaagaaataatctgattttaaatccaactgagggaagcactgttccccgccggtgaaaatggtacggtccggggcagttttctt

SEQ ID NO: 53710 - DNA, 413 bp, Mus musculus
  source 1..413: mol_type = other DNA
gttcttgcaataaattaatagctgcacttcattcctcacaaggataggatagttcttctaagagacagcatcctgccttcaaacttacaaaatcgggggcaataatacctataagtaactatcactacttgagattggaaaagctatgtaacctttctgagcctctgactcttcatgagttcttgtgagcattaaatgaaacgaataagtttgttcatgaaaccgaagggagcattgctttttttactgacacccccgcatttgggttcatgccgaagctcctcccagctgctgcttctggtggcgctttcccccctggccggcccgaggtgcctggagcgggccctccgtggcgcgcatgcgcagacgccgtcttggcagagctaatactccaaggcgcctgtcacatgagc

SEQ ID NO: 53711 - DNA, 153 bp, Mus musculus
  source 1..153: mol_type = other DNA
agagagaccctcctaatattaaactggtttaaactcatgatctctatagaaacagtgatgtcatgaattttaagttctagtaggtactacaacggccattttctctgagataactaagaatgactttggtcaaaatttctttctgtttcactt

SEQ ID NO: 53712 - DNA, 394 bp, Mus musculus
  source 1..394: mol_type = other DNA
cccagggcctttggagcctgagtgggacaggatgggctgataagtttctcaaagagacatgtcccttcagctggtccccagtaaagtttgagcttgctgctggaggcaggttcagccgctggaatgatggatgtcggagctcccgcctttattacagaatcgggccccccgccccacaggctaggggaagctgcacccggcgcgtccgctcccccacgtgcctggctgcagaagcggcctccgctagggggcttcggcgggagcattcccgggggcgtcgcctgcttccgctgccgcctccttcagtgatcagtccggacggggacaccccaggtctgcgtggcccccgcgccaccacgcccagtggccgcccgagccccacgagcagggggag

SEQ ID NO: 53713 - DNA, 292 bp, Mus musculus
  source 1..292: mol_type = other DNA
gcctcgaactcagaaatctgcctgcctctgcttcctgagtgctgggattaaaggcatgtgtcaccactgccattgttaccttaactagtatagagaagtatcagagacatccctaagcaatcattaatttcttaattcatgcccttggctctgaaacccataaaacaaacacaatacgatctactgctttgtgcactggttttcaaaacccagtaacagaaagtaaaaggttgtagaaacggtgcgcacattcagggaactgctgtctctgcagttgtgggcatttcactct

SEQ ID NO: 53714 - DNA, 507 bp, Mus musculus
  source 1..507: mol_type = other DNA
tgcagagagtccctcaggctgcaatatatcaggtgacacttgctgttctcaggtgaggacagtcacgtccatctccacaggccagtgtggcctcagctcacatccaagctgtagaacagtgtgtacaatatatttgtgtgcattgtaagataaacatatgaagtatgcttatgtatttgtaaacaaattatgaaggaatatttctaatgggaagaaaggagactttttactcattattataatttgaaagttgttaccaggaatacagtttctttcataataaaaaacctttaagtaaaaacatagataacatatagaaacatatagtcatgtgttgtatgatgatgtttgatcaacagaccacatatatgatatgaaataaattcttattgccaataagtaacactacagtactcatatgtgtgtggtgacgctggtttggtttgctcatctgtgaaatcatagctaatcagcttctgcttagcaaaggtgacgcacaagtcagcc

SEQ ID NO: 53715 - DNA, 333 bp, Mus musculus
  source 1..333: mol_type = other DNA
agtgcctagcacatgtttccctcctgcctgtcctggagagcaggcctgggggagggtacatccagcccttggtggaggtggcgtacctgcgcctcaccggcttcatgcagctcttcagctgcgcctcagcctccacaggaccctggcactcaggctgtggctccagctgctgcagctgctgctgctggggcagcccttcggcatcagtgcccagaaagtgccctcgggggtctcatagcgcaccacgaagtcgaggcgcgccccatcgctcgcgccctcagcaaaggcagccaccgtcgtcgggtgaggaggctgacatctggccagggccca

SEQ ID NO: 53716 - DNA, 95 bp, Mus musculus
  source 1..95: mol_type = other DNA
gaattctgattctgcgctcaatcactcaatagctcaggctcagctgcacgcgcgggtcaatcacctgtacgtcactccaggccctgcccccgccg

SEQ ID NO: 53717 - DNA, 438 bp, Mus musculus
  source 1..438: mol_type = other DNA
tttgttttaacaacccagagccttgtgcgtgttaaacaagcagccgctggctgcattaacagccactggggctgttcccagtggggctcactcagagactcgcagcagcttctgggagccagccattctgagactctctgattctgtgaatttgtggcttgccttctgtggaaagaaaggctacaggagtggccagctctgccaagccttggcaacatgatggtggtgatcatatgcatgcttagcctcttacacacttttgtttaagaaattgtggtctgtggtgaggggaagaaatcatattttcagatgacttgtaaagggcaaagaaaaaacccaaaatttcaaaatttccgtttaagtctcataaaaaaaattggattattagaagagcgaggtcttccacgccgtggtttttcttctcggtataaaagcaaa

SEQ ID NO: 53718 - DNA, 340 bp, Mus musculus
  source 1..340: mol_type = other DNA
aaaaaattggattattagaagagcgaggtcttccacgccgtggtttttcttctcggtataaaagcaaagttgtttttgataatgtgggtgagtcccccaccagacacagctctgctggcaggagcccaccagtacagctgaagtactttgattgtttgatgcacagataaacaggatttttttttaacatatgtctatcaacagatgctccagctataactagaaactagaagtgcatctcttgtcggtattgagcgcagatatttgtacacaactggcgcttaataataactgtcaggtcagtcttagcatttaactgaccttctgcttgtgtcacgca

SEQ ID NO: 53719 - DNA, 269 bp, Mus musculus
  source 1..269: mol_type = other DNA
tcataaggaggtgatctccttctgtatgggacaggtgcgagttatttatttaaaatctatttatgatccttttgtgtgtgctcacgagcataaatgtgtcacagtgttccaccatggatctcagggagagaactcaggttgtgaggctatcctgacctaggaacagtcattttgtacacgtataaacttttatagcttggaagatgaacgtgtcttataaatgaaaatttttcccttggaggagaccatgggactacaagtgaaagcct

SEQ ID NO: 53720 - DNA, 438 bp, Mus musculus
  source 1..438: mol_type = other DNA
ctctgtgtctgtctctgtctatatatagataggtaggtaggtaggtaggtaggtaggtaggtaggtagagatattaataataaccagaacccagcaacatgggtttgtggctaaagatgttgttgccaagtctgatgacctaattttaagacataatctcccttggattgtccttgattagatagatagatagatagatagatagatagatagatagatagattcttttaaaaatctagaatgtccttggtctatccaaagaacaattagaaagctacccctcttcctccagggagttctccaaggaaagagaggaagaaagcctgcagccaccctaggctttgccccaaatctggatcagggcacagaatctcaacccagattcagaccacaactgtcagagctgaccaataggaggcgcggacggctgcgatggtt

SEQ ID NO: 53721 - DNA, 403 bp, Mus musculus
  source 1..403: mol_type = other DNA
aaggagatcacctccttatgaggtttggttttcagacaacaaaatcttgcaatgtcaggctggcctcaaaattgtaataataatatttctttctcccaagtgctaggattaaaggcttgtattctatttttaattactgtagatttacaatgagtcttgatattttttgtcatttgtctcaaagactgtcaattccaaagaaaactatgctgagattttgtttggtatagccagaatgccaagaagatcactttggggaactttacagcatcactaaatgttacatatttctcactatctgacttttttcctagagataaatatatatatatattaggtttttcctatgtacctcaagtgttatatgctattggaaaattataccttttctctaaggctggga

SEQ ID NO: 53722 - DNA, 345 bp, Mus musculus
  source 1..345: mol_type = other DNA
gggtataaaatggtgattttaatctcaactatatttttaacctatctggcaggtatctctctatgctaaataaatgtattgttaaaagaaagggagctatatagtcggctaaaaaatctagtgaactgtctttaaactgtggagacgtttaaactgcaaggactctgaacacgagactcattttcctcatctgtaaaaacaggactaataactcaggttggcaaaatgtcatccggtaaaggacccttcgctcagagacccagagtctctagcctcccgaatggaatgggggcgtggctgccgccgactgggctgttccgacgatcgcgcaccgcccccgccgct

SEQ ID NO: 53723 - DNA, 210 bp, Mus musculus
  source 1..210: mol_type = other DNA
ttctctgtatagccctggctgtcctggacctcactttgtagagcaggctggcctcgaactcaggtgaaaagagtctttaggatcttctagaataccccactatgctggtaccaaaatggaatgaaggctcagccttctgacagtctgctccccttgaacgccaataatgggctttccaccgtggggcgggccctagctgccaggcccgac

SEQ ID NO: 53724 - DNA, 481 bp, Mus musculus
  source 1..481: mol_type = other DNA
tgatgatatagtcactagtatccatttggtacatctcacttattgtgaacaattgggggaattaagtcttactacctcagaccctgcctgttaggtggttctcaacctgtgtaaacatctgtgttttctgatgatctcaagggacccctgtgaaaggatcgttggaccccaaaggggtccttaactgctctatgcaaagggaaaactttttaaaattcagagcactccgaattcaggaaacatacctggcctcgagaatttcgagtttaaacagggattacttcttgaccttttggctaagttcaaaagtagaaaatcgacctcggtagctcttttgcattaaaaagaaagaaagaaatctacatattcttgctcctggtacctggagtttccaggcacccgtatcgtcttcggccgcagggcaaagggggcttccggggcggcctccacctggcccggccccctccggccccgcctgccc

SEQ ID NO: 53725 - DNA, 293 bp, Mus musculus
  source 1..293: mol_type = other DNA
ctctctctctctgtcaacccagtgtaaggaggacagctagaatggccaacatcttgatctttcattttccagtctccagaacaagagggaatcatggttgcccaagtgtctatggttcataaacactcatactcaagtctttatgaacactctgcattttaatttttaaaataggctaccgcaaccaggcctccttgcctgcggccaggtaggtcacctcctggtccgggcgccaggcctgggactggccagacaacagcagcgtccaggcctgggctaggagccaggtgagc

SEQ ID NO: 53726 - DNA, 306 bp, Mus musculus
  source 1..306: mol_type = other DNA
ccagcctggtctacagaggttccaggacagccagggctatacagagaaaagcagagtgttaactattatggctctgattatggctcaacactctaatatttccagtgtgcaatagcttttgttaaaaaagacaggtacaggtgtgtgagcaatcttttacggtaacaaaggatctttttgtaaaggggaaaagaaagtaaaattccactcttatctttccccggggtgggggcaagccctttcccgggttcccttagacagtcctgcctgagagccctggctggagtctctgcccagatcctccgg

SEQ ID NO: 53727 - DNA, 356 bp, Mus musculus
  source 1..356: mol_type = other DNA
gttagaccattagccccagtgggacacccgaggggattggggtatgtggctgggcacctcaacagagaggcctttgacgtgtaccttgacatctgtgatgacttctaagctggcagctgtactgggaacctacagtaccgatggccggccgaactcagctgtgtctaaataaacagctcgaggacagcttagtctgtccctgggcctcctataatgtttagtctctgtaatgtatatgaataaaaggcctttgagtggcatttatgacagccggtggtgccccgcccaggggtaaagaagctgctcgccgcgtggcgaccagctgcgcagtatgcatacgttgctagtcggcggct

SEQ ID NO: 53728 - DNA, 380 bp, Mus musculus
  source 1..380: mol_type = other DNA
tacagataataatagataaataaatctttttttaaaaaaaagcatttcctcaacttgtctcaagttgacaccacagttattcactttacatataattagataaaatttgttttcatattttattcatttgttcatgtttacatgtatatgtgttcatgcatagcatggcacggtgccgtcagaggcaactacttcaagaactcaggtcttcaggacactattacccattaagtcatcttgtgtaaatgaaaggtctccggcagtaaatgtaacttttatttgcctcacattgtggaagcacattatgagttttataaacaaatttatgttcgtgcatctgaattcatagcggttgaatacctacaaggcacacttcccag

SEQ ID NO: 53729 - DNA, 459 bp, Mus musculus
  source 1..459: mol_type = other DNA
aatttatttccctgtctgcttcgctccaggctagaaatgttaacagggagaacatggataaagttgagtcttcgtattctttctcctttccagtggctgtagaccaggctggtctcgaactcagagctgctcagagctcagcggaggctggctctgtgccgatctggtctctccttagaaaggtcaacttctctcgaaatcatcatcctaattatgggagaaattgatccaaccccatgtcccggggtgtaggcaggctccagtggcctggggatttgggcagtggctcctcccacaattcttgttatctcttagatatccgcagtgaggaaagcattctatgctttctatattgggctccccgaggcacctggtcccccagactgccttcccaggggtgaccctagccctggaagcgggtgtgggccaaccccatcctgtccaggtaggttgggccta

SEQ ID NO: 53730 - DNA, 341 bp, Mus musculus
  source 1..341: mol_type = other DNA
taaatgattgatcaagcaaggaaatttcttgtatgcaaaacagcttgcctgcccattttctgcattattcaaatagttcattttgattatagaagtcattctctggaaaccagatctaagtctattgcgtagtacaacgatcatagtacagctgagctctttctggaagaccagctccgtggctggactgtgggtaccaaaagggcagggcaccacctttaaggaacgcctcccggggcgtggcctaaaggcccttttccgaagggcgggccgaagccggtgttccctaccgctcgaagtcgtggcttagggcggggctgcaggaggtatggcccaaccag

SEQ ID NO: 53731 - DNA, 298 bp, Mus musculus
  source 1..298: mol_type = other DNA
cattttctgcattattcaaatagttcattttgattatagaagtcattctctggaaaccagatctaagtctattgcgtagtacaacgatcatagtacagctgagctctttctggaagaccagctccgtggctggactgtgggtaccaaaagggcagggcaccacctttaaggaacgcctcccggggcgtggcctaaaggcccttttccgaagggcgggccgaagccggtgttccctaccgctcgaagtcgtggcttagggcggggctgcaggaggtatggcccaaccagcagtttcccc

SEQ ID NO: 53732 - DNA, 442 bp, Mus musculus
  source 1..442: mol_type = other DNA
tactatagcaccaaaagaaacaatgttgttctggctgtactgaaaagtctaagaatggtatcgttttaaatgactgcatttatattgagagagagcctatatcaataaaatctttcaatttacaaaggccctgcttgaatatatttcccatagcagggaaatcatttcatttctatgactagatcttttccctaatatgagataaagcactgtgttaataaaaatcattgtcagacctttttttaaaaaaaaatgaggggttcccctttggggtcacccgtcttgattattaagtcactttctctttaaaggagcgtcgcggaagggtaattttccgtcagaggattacttccctatctaacagacaatttacaattctgtaaaaatcaaagtaaaatttgtctgacctttgagcaatgctgggtcagtggttagcactgac

SEQ ID NO: 53733 - DNA, 269 bp, Mus musculus
  source 1..269: mol_type = other DNA
tagaggccagcgcggagggccctcgagccgtgagagcgcaggccagctgagtcggcccagctgctcaggtgcggggccacctctggggccgggagtgacaactgaggttccccggggactcatctcaggacacggggggtcctcgtcttgggtgggcgccaaatcctggggtttcccccctcccccttttagtgtgtgtggggggaagcaacttgctgggcccaatcggttcacccgctcacttgtcttatccaatgggtgataaaatg

SEQ ID NO: 53734 - DNA, 163 bp, Mus musculus
  source 1..163: mol_type = other DNA
tatatccaacttgagtacacttgagtatctgtagattgtagccagtccccttttgtgatctacaagggggctccaacccgggtgtgactgagggattgcaggccgtcctttactgagaactcttgagagtgcacaactcccaactctcagtcccttagaaccc

SEQ ID NO: 53735 - DNA, 279 bp, Mus musculus
  source 1..279: mol_type = other DNA
ggcctgtaactgagttccagatggaatccttggagagccgagtcttactgtatatagtaagacagaccgctctgtttatgcacagtgccgacgcctctgagcccgactttgaaattccttgagaacgagcgctcaacccggattggccagtgggggctgcgtcctgttgtgcatgcgcacaaccaggaagccccacccggtaggagggagacaaggctgcgaccaatccgggatctcctcctgggcgtgacccgcgtcccgtctgcggtcctcgaaccg

SEQ ID NO: 53736 - DNA, 386 bp, Mus musculus
  source 1..386: mol_type = other DNA
aagtctacttgtgagttccacacacaagtcgagtcctgaggtcagcagccttacctgaagaccagactttttacaaggaagttgtagttcccacaagaactaagtcctgccagacggtaaagaattttacccttccctgaagagtggaccagctctcctataagattacagttttggagcaaagcacacgtgacaggatcctgtctacagcaaagcggcagcaaacctgcatcctaggaaaggaggctgcgctttttaaaagtgtgtacacaccattcccagaagcgcgtctgtctatgtgtgtgcgcgcacgcgcgcgcaccctcctacatttgcacctccgcggaagaacctgggcgggtctgtcgcgcagggcgactctcccg

SEQ ID NO: 53737 - DNA, 231 bp, Mus musculus
  source 1..231: mol_type = other DNA
tggattatttaaaaagccatgtgtggaaacctatttaataaataatgaagtcacaagtggattgccatttatagaagtaggcatctactagatgctgagttttacacttccagaaattccaagctaaatcccagtcactagaacctctggcccttagagggcggcacgctgcgggagaccgtctgcggcgccccgggtctcctgttatagctgggaacaggctgagagccc

SEQ ID NO: 53738 - DNA, 290 bp, Mus musculus
  source 1..290: mol_type = other DNA
ctacaccacagagtaaccgtgagtgttaactagcaaacgttatttaagtaaaatatagccatctggcttagcccacagtgagttcacacttgtcccacacacatactgggacactccaaggcagtgaagtttccgagcctcccgggtcagggacttgacactgcagccgcctgagcgtcgcgcggacactcctccatggcgccagagtccggcctggcgcagtcggtggcgcgggcgagacactccccccgtccccctcccgccaattggggctagccccgttccatgta

SEQ ID NO: 53739 - DNA, 254 bp, Mus musculus
  source 1..254: mol_type = other DNA
atagatgcatctgctgcccctcttcgccaagcgggtctgcagcgcaacaggaagcggcatgaagggcagatctgattaacatttcaatctagtaaccacgcgtgtgttcacacacacacaaactctccggacccaggcactggagaccggatggaccaaagacccagttccttcctcaaagtccgcacggtgggcttggtttcaattaactggtcgcatccgacgcttacatggaacggggctagccccaattg

SEQ ID NO: 53740 - DNA, 463 bp, Mus musculus
  source 1..463: mol_type = other DNA
gagggctgcagtttatgggtgtagggctttgtatatgctaggcaaaaaagatgaactacatccctagactgttgaactagatgtagtttggggatggcaagctgttgtatcatttaaaaaacatttacatatttgttgtgtgtagtaagctcctacttaaatagctttattctggcatgaggctaatccatagcaatatgaagctgccagtggccatgtcatctcaaacaagagtatagtctgttgtctccccaaggacagagaccagagcctgattttggtaattcaacagcaaggtctattgccctagcaactgcccttatactgccatggcaaccgccagtgcagagtctccactttgccccttggacatctccatggcgatgcgcaggatgaactaattctgcgcctgcgtacctggatgtgcgcagccgcagagcgctgctgctgtgcctaataccca

SEQ ID NO: 53741 - DNA, 288 bp, Mus musculus
  source 1..288: mol_type = other DNA
aaggagggcatctccccaccctttacatagggtcccatataaatcaggccaactttaaactcggacatttgcaccatatacatgattgcagctaggtgctacttcatacattttaggcagtgcctgcatagcaagcacttcattgctcagaattctagcctgtgattgtcatcttcagataagttctttctgacctcttgcaaatgttccacatttgctcttacatgcaggtgggagggggaagctcacatctccgccctctgctgcctctgggggtagggagcatcc

SEQ ID NO: 53742 - DNA, 259 bp, Mus musculus
  source 1..259: mol_type = other DNA
tttccaggtaaggaaacaggacagaactgtgacctgtccaagagtctacagagcagctttacaatgcaaactgccaccagccaaagtctattatagagctcgggaagcttctttgatttgttctcgaatcactgcacaacacaactgatgtagactggcagccatagccagtcagaacgaccgcagcggcgaatgcggggtaggggcagatccgggtctcgaacgtgcccggggccacacaggtcgccgggaatttggc

SEQ ID NO: 53743 - DNA, 191 bp, Mus musculus
  source 1..191: mol_type = other DNA
cctctgggactcccaggggagtccactctgggtgtcacctcgttgaggcactgtccctgtggttactgcggcaacttatctgctgccccagagcaggccagagctggcgtacttaccaagtcctaaactagtagtaaaacatgaaacttagatcttgaccacccactggggcaccagccactccctgggga

SEQ ID NO: 53744 - DNA, 403 bp, Mus musculus
  source 1..403: mol_type = other DNA
tttgtagaccaggctggccttaagacacagttgtgattgttgagtgtcaatcactattgtagtatgttctgtacttcacttggcaatttaggagtctgaggttcagcctggtctacagagtggctcaagtctgttttcaggaattcaagattacccttaactaagctggtcaaaggctttccaactatgtgaaactcttgccaggagagaagctttcacttggttagaatcctgggaaaattccagtttctttgactcaattttctcactcagcccctgccaggacagttacagtcagagctgggcatggtggttgcacacctgtgttcccagcacttgggaggcagtggcaggacaccttggactccactgagatcttgtctcaaaggaataatagcaagaa

SEQ ID NO: 53745 - DNA, 486 bp, Mus musculus
  source 1..486: mol_type = other DNA
ctggaggacagccagggctatacagagagagaaaccctgtctagaccgtgcttatccagtgtctatagaggcaaaaggataccccagatttagggttactgatggttgtgagccaccatgtggattctgggacccaaacccaactgctgagccagctctccaaacactaatataagttttaataaagctagtgagttggctcagctcagctggtgcacctacacataacacacataaaataagttttaaaactttatactgggagcagagacagatctctgagttcaaggccagcctggtgaaaaagacataaaaagtttatactttttatacactgtggggcttcccagatctattttaagccagcctggactcctagtatgtatgaaaatgtcatgtatacttttcctaccacatgttgttttttttttttttaaagaatttctagaccatcctttttatgaattttttaaaaactgttatctc

SEQ ID NO: 53746 - DNA, 237 bp, Mus musculus
  source 1..237: mol_type = other DNA
ttataggccttggaaataatttttaaaggaaaaccatttagcagttaaaagcatctgctggtagctagcgtacaaccagttgtctcttctatcctctgcaatcggaaagcggatcggagctctctcatagggcactgctctggcagaaaagaggaagcacttatattggcactgctagaagtagaacccagggtttcttcagcactgttgtaccactaagctgtaccaggcacagag

SEQ ID NO: 53747 - DNA, 315 bp, Mus musculus
  source 1..315: mol_type = other DNA
tctctgtggcaatttgaataaaaatggcccccatgtgcccatagggaagtgcacgtgctctagcccatttagctcctgaataaatgacacaggaacgtaataaatttattaaccctcaaggtgagttcagcttgggacccccagactgggatgggatcttttcatgacaatgctcatctctggactgcccggggagctctgtgcacagcaatcagcatctaggtgtggcatgtttctctgtgtagccctggctgtcctggaactcactctgtagaccaggctggcctcgcaagtgctcaaactttgataaggttg

SEQ ID NO: 53748 - DNA, 393 bp, Mus musculus
  source 1..393: mol_type = other DNA
ctcatgtcttgttgacactagagatatgaatacgtctgtaaatctgtaataattgcacggactgtgtacgtgtgcatacacatatgtaggctagaggtttgggtgtgtgtatgtgtgtatgcagacacatatgtaggtcaaaggtcaatggtaagcatcatccttgattgatctcattgtattttttttaatattaaatttatttggggtatgtgtgtatacacctaccaaagtgcatgtgaacagaggacagcttacaggaatgggttctgtcctctaagagcaccaatccctccttacctatatatatggtaggtccaccctggcagtgaatgcctgctcctggagcaaaggcaagctttgctactgcgcaggcgcactctgaataaaggc

SEQ ID NO: 53749 - DNA, 355 bp, Mus musculus
  source 1..355: mol_type = other DNA
aaatttattaagagcactgactgttcttacatggtggctcacagcatctgtgaagacagcacaggggaagtgagtcatggccttctatatcattggcaaggtttctctgtatagccctggctgtcctggaactcactttgtagaccaggctggcctcgaactcagaaatctgcctgtctctgcctcctgagtgctgtttaaaaggaaaagctgtaatgcaatggccctttacacagacttgtgactactctctgcgtagctaccctgaaggagaagctctgcagatggcgtagctctccgcaaggctgatctatcctagagaggagaacaggccctctggggggccctggaggac

SEQ ID NO: 53750 - DNA, 189 bp, Mus musculus
  source 1..189: mol_type = other DNA
tgctctagctgtgagtcaccggagtgctgcccaggaaagctggggtgatgaccacgccccctgggacgctgacattccaagcccttgccctgcaggctccgagcatgctgggaaaatgcggtttcgcagactgtcttcgtatgtcatcatgctagacttgactatattgtcgctagagtgatactaatt

SEQ ID NO: 53751 - DNA, 484 bp, Mus musculus
  source 1..484: mol_type = other DNA
gttattatttattgttattcttataaaatatcagagtaatgttcctgtaatctcagtgctcagcggttaggcaggaggacgaggctgtggtctcaggactgaatccaccctgagaatgggaagtaaccaatcccaggcctgcgatgctagcgtggcccaaaccactgcgtgtggcctggggggcgcccacgtcgcgacccctgcaacccggcgcatgcgcggccgcccggacggaaccacacggctgcacggcgaggggggaatcgggagcggagcccgccgcccgcgctcccgcgcgccactgcggagggcggccatggggcagagtgaggaagcggcgcctggccacgaacggccaccagtccgctcggaaccggctcccaaggcactcgcgcaggccattggttcggaagtgaggctgcggccctgggaataacgtggtccgggcagcgcagtgattgtagccagtgacggcattctgcca

SEQ ID NO: 53752 - DNA, 368 bp, Mus musculus
  source 1..368: mol_type = other DNA
gccctggctgtcctggaactcactttgtagaccaggctggccttgaacgcgccaccacgcccggagtccaggatgtagtcctggatttgactacataggcaaccattatgctagactaaacatcttgaatttcaaccttggaatttctgtttttgacactgagaggaatactcaagataataaggtgaatataacagacgattgggatacttttcctaattgcatatttttattaagatactcaagttgagaatgcaggagtcagtctctgcatatattttatttgcctggccaaatgtgtgctgctaagaaaccactttcatgagaaagtcttatttcctgtgtatacaactgcctgcgaggctccc

SEQ ID NO: 53753 - DNA, 390 bp, Mus musculus
  source 1..390: mol_type = other DNA
acaggtggcttctccgcctcatgcaggaccagtcgtcgcctcccaggcagcccggctctgtcctcctgtgagtggccacgctgcccctggggagacggcccctgtgcaggcaggaggcctcagaagccaaaaccccgggatctttgagtctcccggtccttgacaaaaaaaaaatcctgtatccaactgaatttatttcaggaagttaaagagaatttcaggttttagttctagactagctcttctccaccaaccctcaaccccggggctggtccatggctcaccctcagagataggcccctcctacgaagagtttcccttcttcagacgacaccagcaaggctgggtgagcccatccgccatgccgtcattttgtacggtcgcgcaggc

SEQ ID NO: 53754 - DNA, 242 bp, Mus musculus
  source 1..242: mol_type = other DNA
tacttacaaatttaataaaaatccaaaaagtcaacaatgtggcagtggacttagacactacttgctatggatttcattatgtactgcaaaagttagctagggcctctctgaggacggcagttcgctggcaccgacctactgtcagttaggacttcctatggaaaggacccggaagcggcgaggcaaattgctgcctccgccttccaatgagcacgcacgccagggcgcgctgggggacgttg

SEQ ID NO: 53755 - DNA, 309 bp, Mus musculus
  source 1..309: mol_type = other DNA
tagaacttacacaacaggctcggttttttggttttttgtttttttttttttttttcactgatcagaggggaaaaagggaaagcatgtgatctattcgcgatgaattcaaattatgagatgatcaatattcttctacaccaactgctcagcagggaactgattggttgcctagaaaacttagaagaccacgcaacgcaaatgttgagggtttcaaatttcagcctcatggaggtctccactgacttggtctcagccaacaattcggaggactcctatggtccgctccatcgggcggggaagcgctagagc

SEQ ID NO: 53756 - DNA, 362 bp, Mus musculus
  source 1..362: mol_type = other DNA
gggtcagaatgaggtcaagatctaagcccccttaatgccctataagtgcgccttaggggaaatcaatacagacagatctttatcagatcctgggattttaacccttagggggtcgataaggcacttagtgagtgttcctaggtgacacagttggaaattccttcagattccttaagagatagaaaaggagaaacaatggcttttttttccagctgtgacaatcaggcagaaaaggggctagccccctccctccctatctttcattctgattctcaaggtttataaaataatcattaggaaaacgttcctgcttctgtgcgccgacgtgctccagcgccccgccgccccgggatttaaagggc

SEQ ID NO: 53757 - DNA, 237 bp, Mus musculus
  source 1..237: mol_type = other DNA
ggaaaaacaaaaaatacaaaacttttattcattcatacatgtatttattcattctttatttatttatttatttatttatttatttatttattaatgtattaaaaagtatttggaaaatatacaattagaaaaggatgtgcatccgatttatcccttcttttcagatgaggaaactaaagttcaagaaaactccggatcgcgcgccttgcaaaactactgggaactgaagttcctgtg

SEQ ID NO: 53758 - DNA, 339 bp, Mus musculus
  source 1..339: mol_type = other DNA
aaggcttcactttaaataaactcataatgtctctaggcagttcatgactgcgaatagacccagcagggtgtatttatgtatgtatgtagacgtgtaacaataacaatacatttcatacatatatgacattacatatatgaaatgtcagagtgaaacccattattttgtacaatttgctaattaaaaaaggcaggctttccaatcttactctgagaaaacttatgcgggcttgtgaggcaccccaagctcaggtctcctaaacttttcctctcaggagaggagagtttaattgatggtgaagatattcagaacagacaggtgacacgtgtccctgttaag

SEQ ID NO: 53759 - DNA, 293 bp, Mus musculus
  source 1..293: mol_type = other DNA
acatttcatacatatatgacattacatatatgaaatgtcagagtgaaacccattattttgtacaatttgctaattaaaaaaggcaggctttccaatcttactctgagaaaacttatgcgggcttgtgaggcaccccaagctcaggtctcctaaacttttcctctcaggagaggagagtttaattgatggtgaagatattcagaacagacaggtgacacgtgtccctgttaagcgggagacagagtctgccctgtgggaggagttctatttcccacttcaaatggccatttcat

SEQ ID NO: 53760 - DNA, 503 bp, Mus musculus
  source 1..503: mol_type = other DNA
caccagagttttgtgcatatttgcttagtactatagtattttattaattgattgatcccttgattaaaatgaagtaactttgtctacagttactgcttcaggcactatattcctttgtaatatgacttaaaattaatttttataaatgattaagaagaaaacataaggaaaggtccattgaacattgccttgccccaagaaatgtgtcagtcattgtgagcagggcattattgacagagcagtcctcagaatgcaaagtctacatttaagccttcctaaaagaagcacttgggatccatttaaagagcaccataaaatgcagactgttttgctattattcataagaatattggtggtataggaagagtttcaactctaatgctttcctttaataaataattgaaatgttatgggtttattgtaaagagaaaattttgagtggtttgccatattttttttgtagagaaacaactgcctagtagaggtgtgtctagatatagaaa

SEQ ID NO: 53761 - DNA, 210 bp, Mus musculus
  source 1..210: mol_type = other DNA
ccgttctaatataagtcaaaatagtcctgctcctggagattaagcagtagtcctaggaggaaaactgatagctctcagtgcctacagggcttcaggcccctaaggaaccgggggcgggccactagctagccttttgtctggctggcaacccaacggcgcgcccccaaggccggctccgccccctcttggagtgggtggtgtgctcctgcg

SEQ ID NO: 53762 - DNA, 323 bp, Mus musculus
  source 1..323: mol_type = other DNA
tgaacccctgtcatgattgggctccaatcctcatttcaggtgatgctcagctcctcccatcatggctgaatctctgtcacgattgggccccaacccaggcccattatccttaggcttaatgtcatgggactgaatccctgtcataattggatgatccctgtcatgattgggccccaaccctcatttcggctgaggccccactcctccaattagccctgaggctgaatccatgggggctgaatccctgtcatgattgggccccaacactcttagacctgaggctaccatgtcttgtcatgattgggccccgtgattgggtgtca

SEQ ID NO: 53763 - DNA, 280 bp, Mus musculus
  source 1..280: mol_type = other DNA
ctttcctcccttttgaaatggtaaggtaaaggaaggtggggacatccaaaggatggagtccaaagccttggactaaatgtattaatagagtctattaaaaaccaatgatgtcatgattgggtgccagcactcattgctgctgatacccagctccgattagcccacctctcacattagacctgaggctgaatccgtgtcatgattgggccccaaccagccctgaggctgaatccgtgtcatgattaggcccctgtcatgattgggtgtcacacctcatttc

SEQ ID NO: 53764 - DNA, 325 bp, Mus musculus
  source 1..325: mol_type = other DNA
gctgaacccctgtcatgattgggctccaatcctcatttcaggtgatgctcagctcctcccatcatggctgaatctctgtcacgattgggccccaacccaggcccattatccttaggcttaatgtcatgggactgaatccctgtcataattggatgatccctgtcatgattgggccccaaccctcatttcggctgaggccccactcctccaattagccctgaggctgaatccatgggggctgaatccctgtcatgattgggccccaacactcttagacctgaggctaccatgtcttgtcatgattgggccccgtgattgggtgtca

SEQ ID NO: 53765 - DNA, 219 bp, Mus musculus
  source 1..219: mol_type = other DNA
tggggcctgaggttgaatccatgtcatgattgttagccttaggctgaatccgtgtcatgattgggatgattgggcaccagggctgaattcctgtcatgattggatgccaacagacctggggctgaatccaggtcatgattgggccccaaccatcattctcatagccctgaggctgaatccgtgtcatgattgggccccaaccctgtcatgattgggtgt

SEQ ID NO: 53766 - DNA, 381 bp, Mus musculus
  source 1..381: mol_type = other DNA
gctgagctccttatcattactagaaagtaaaaggtggtagctacatttatctgcatataaggacaagatttagaatattgtaaggaattatgtaacttgcagctattcactgccacagaaagtgagtgccattcattgtaacttctggaactatggaagctagactgcagaaaagatgctttctccaggtcagatctccatctataatctatattgtttgcacacagtgtattattttcattaaatataagatgatattcaatacacatttccatagaaacattctttaaaacatatcaaaaaagactgtagtaaataaaggacttttttttgggtccatagggcactcccttgcttgtcatagtagaatccaaggtattc

SEQ ID NO: 53767 - DNA, 473 bp, Mus musculus
  source 1..473: mol_type = other DNA
ctcaaaatacaaatacctcttcagccttcaatagtcaatactttttggaaggaagaattattttaaaagacctaaacataagaaagaaaagtagcatatgtgttttgttttctgtcttttacttgtgtagttactgtcttattaagtttcaaagcatactaactagctaatgatctaaagatgtctattagtctctttctaattccaacttcttcttccttgcccagttgacaaacttaactgaagatgcttataacctagggctcttggtatatactctgactttctattcagttaagtctgagacgaaacacccggtgcaggggactggaagtcatcacctctgctgccaggtgtgctaacggccagcctcagcattcctgatccgtgccctgcacgtcccaggccttctgcagggaggggaggaggaggagtggcgcggccccgcgtgggtcctgcctgaggagatcacc

SEQ ID NO: 53768 - DNA, 345 bp, Mus musculus
  source 1..345: mol_type = other DNA
agcgtctaaactgtggctctccacagtgtccaaactgaagtaaacattttaactgaagtacatcaactaataagatccactgtttttttttaacaaatgatttaatattcaataatgaggtggttaagagcactgactgctcttccagaggtcatgagtaaaatatattcaataatgcatacatacatactagtaaacattatgcacatagggccatttacacagcttactaattagcccatggaagttcagtgtttacataaaactaggagtctttccaagattaatagtccctgaccaggaaatcttctcctgcatagcctacttccctcctatgtagaaagc

SEQ ID NO: 53769 - DNA, 315 bp, Mus musculus
  source 1..315: mol_type = other DNA
ttctgtttgttattattattattattacaattgagtgtccaactcaaaacgggagtatgttcagaatttattgtattcataccttttaagtaaacagtgagtgaaaaacagttttatctgggagagaaaactttggctccccttctcggtctgtactagaaagacaaaggactttgaaaagcatctcagtggctccagcggctgcaggccctgggggggggggggggggactttgcccccagcgcgggggcgggacggccgtggcccgggctgtcaggggctacgggttcgcggcccgcccggaacagtctgtga

SEQ ID NO: 53770 - DNA, 381 bp, Mus musculus
  source 1..381: mol_type = other DNA
ccctatttaggagagtcctgattggctgcagcccatggctgagctgaaaaatacccttggcacatgcgcagattatttgctcccacatcctattagattctaaaacctagaaacatttcatcatatcaagaagaaaacatgaacacgtaggtcttgtcagattgtaaaaatctaaggaggcctgcctacttgagagatctcatcttagtaaataagataaaagactgatcaagggtgagtctagttcccaacttcaggccttaggaatcatatgtgtggccacacagatgtgctgtttcctaatatgggcatttctgcactgaacaccagagttcagtggctaccagtgatatcataaagtatgttgtaacaaagtcctct

SEQ ID NO: 53771 - DNA, 563 bp, Mus musculus
  source 1..563: mol_type = other DNA
tgtcttgaagcctgagtacctgccagaccatgtttacaagcttagcatatagaaagtacttacaagtgatatcagttgtttggacttcaaataagcaactgtattattccttggcactgtaactgggtccaagtaaattcattataaatgtaatcataaaatagaacctaatctataggaattgagttgtaagaatcaaatgacttgatgtatatgtgtgtatggttatgtttctgtatatatgtatatatatatgtgtgtgtgtgtgtgtatatatatatatatacacacatgataccattttaggtacctatatccattttaagatataaaattggcatctgataatcatcctataactagaatcagtattgttaacatgtgttttatctagctagttggataacttgaaagttctaactacataactagttattattaaaaaaaaagtcactgtctaataatcttatgaataataaaacaaattttaaaacctgacaagactgaatcacaagatttcagttggccaatgattagctaatttctgataatagaaaaggaaa

SEQ ID NO: 53772 - DNA, 369 bp, Mus musculus
  source 1..369: mol_type = other DNA
gtatcaaggttgattcaatagtcacaaattgaggtctatataggcttcaagttacttcatgtctcttaattcctgttctacttttaaagtaatagaaagggattagaaaaagtcattgtgttgggctgaatatctgccctaccttgcatggcaaaaaacattttgtacatactccttataacgagtctccaaatagagggatttatgttatgattttgtgcacattttcagaagactagcctggtcttaagtgcaccaggggtacccttagccccgctaaagggctcagctgtttgcgtcagaaaagcagggcctgcgtaaacgccctgggtctggagtggaggcggggcctccccagaggccagtgcg

SEQ ID NO: 53773 - DNA, 487 bp, Mus musculus
  source 1..487: mol_type = other DNA
gtgggattcttaaactttgtgaagaacaacagtgtataagattactcactcataaccttgtggaccatggaatcaatagagccatatccaataaagttttacatagttgggttttaacatttaactagattgaagattcattatactttctttctcttggaataggaaagttattgggtacaagtgaactaatagaaagaaaaattgaaattaaatatctatactagcatttcctcttcaaaaaaatagatattttgaagatcagatacaactcatgtagatactgaatgaatacatgttcaaaggtgtacaggattgttaaccaagccgatttaaataagtaaattgaatcaaaatgggtgtgttgtgacgacatacagtttccagtaaaacattatttctacaatgttaattcaagtgtaaactgaggagagctacagtttcctcaaaaatagatatttctaggctctgaggcctagtcagaacc

SEQ ID NO: 53774 - DNA, 375 bp, Mus musculus
  source 1..375: mol_type = other DNA
atggcccataggcagccttatgctattagaccttgatggctaattttaggaatgtaacctcatgttacaaagaacccatggcttcttctagataaggcctttctcctgtaatagtgccctgaaattgattcagaggcctatttttctataataagccatagccatttaattgtctggccatgctataatccttttagttgaaaaacaatgttttgctgtatgtactgttgaaataaaatagaatgattttttttcttctgcaaaaaggaccagagggcccagtgggcactaatgacatcacaaaatttgttgtcacaaagatcttttctgaccaaggaggagcagtgatgacacttactggttataaaagctgct

SEQ ID NO: 53775 - DNA, 199 bp, Mus musculus
  source 1..199: mol_type = other DNA
caacccatagggtcattctacactgcagcacagcatggaatgcatggcatagtcttgagtgtcaagctggtgaatggggccatggcctatgtgacacacaagtgcccaggacctctgcactagggcctctagctggagacctccgggggaacggccccggtttccaccctgaaccactctgcgttcctccaccaaggag

SEQ ID NO: 53776 - DNA, 463 bp, Mus musculus
  source 1..463: mol_type = other DNA
tggaagattttcttcccaactattatgggtggaaaaccaaggtttatccagaaaaatataatatttcagaggaaattgtatagatcttgttagacctcaggctaaaacaggaatggcattattcaacttgcatgattgtaataacatttattacgaccatttattcaataaggatctaatgtgtgcatcgagtatatggattgcaaatgacatttgggatgtagtgagacatgatgttgtcaccatatccctcagaagtagatgcgctccagagtctgcagcatggccgcttccaatcgcgaccgctagagggtgtgcggtcgcttaccgccggattccgttcgcaggcttcggcatggcggaatctgagtcactggtgcccggtgagtcgcgcgcccccagtcgtggcggctggcctggagggagggtccgcgggcgggcgggcgggcgacaggccaggccc

SEQ ID NO: 53777 - DNA, 413 bp, Mus musculus
  source 1..413: mol_type = other DNA
ctagaatctcatcctcaactttagtttgtacacaagtgagattctaaactctcgaattctgggagccttaaattcagttgtggaagattttcttcccaactattatgggtggaaaaccaaggtttatccagaaaaatataatatttcagaggaaattgtatagatcttgttagacctcaggctaaaacaggaatggcattattcaacttgcatgattgtaataacatttattacgaccatttattcaataaggatctaatgtgtgcatcgagtatatggattgcaaatgacatttgggatgtagtgagacatgatgttgtcaccatatccctcagaagtagatgcgctccagagtctgcagcatggccgcttccaatcgcgaccgctagagggtgtgcggtcgcttaccgccg

SEQ ID NO: 53778 - DNA, 302 bp, Mus musculus
  source 1..302: mol_type = other DNA
gtactcatcagggtttgcgaggaggcacctgcctatattatttacaaatgtgatcacccttgttgaaatcttaagctctgcaaagatgagatcatttcctctttggaaattcgtctgacacagatgagcagtaagtgcctaccgacttactaaacacctattatgtgctagacaaaaagggaagtgccttgcatcaactgatttttatccaagcgaaagagttaggattctttctttcaaaaacaacagttaggcttaaagttcaagtgataaggtagtggaagggtgctaagacctttgct

SEQ ID NO: 53779 - DNA, 472 bp, Mus musculus
  source 1..472: mol_type = other DNA
atacttgcttggaagccattggatgacaagtgaaccactctcccatagatatctagtgcttccttgctgcagtggggctccacaggagaacggcagtgctcttgttatctgttaaacatctaatatgtaggaagaacgttgctaaatctcgtttttgtcatttccaaaggtgaggaaatcgaaaactattgtcacaatctgttcctggcatagacaaggcaaggacatgactctatacaatcatgtaggcaggttcaggccctgtttccaacaaagccgaaatcttaaagctagggtggtctgagaaaggctaccctgacctccagcctgacttcagctggaagtctgtgcctggccaagctctgcagggcgcgcgcgaaggcaagcgcgccgcccagcctgcgcgcgcacgggaagctccggcagcacgcgctccccctcccgcctgcgcccgcccgccgcccgccgccac

SEQ ID NO: 53780 - DNA, 547 bp, Mus musculus
  source 1..547: mol_type = other DNA
tggtacacagcttaggcttattaagtaacccttgcttaagaactatcttttgaaaggattgggtatactcccattttttttctttaaatgataagatatttgatagccaaactgcagctgaccacgacctgggccgtggagggagcaccccatgtccacgtgcatccggatgtctttcttacataagattcccaagtatggagtcagggcagctgtgaatccctcttacccgacgtctaataataaatcgaggctaaatttcggactgcagtcacttcggagagtgcgcgccaagcccgcccagcccgcgcgcgccagtccgccctctggtttggacggcggcgccctccctcccccaaacagcttgttctgggtttggtgctggggtgcggccgctccatcctcccagccctaccctgccttgccctgctgggccgccctgccttagcccgggtatcaggcgagaggcggagccacccggcgtgccccgcccccgcggtagaaagggttgggcgatcctgggcgcctgggacacctttcccggact

SEQ ID NO: 53781 - DNA, 352 bp, Mus musculus
  source 1..352: mol_type = other DNA
tagatattttcttcatttacatttcaaatcctgtactgggcatatgatctttgcaataccaagcattgatggccgactaggccatcctgtgttccatccaatagatgactgtgagcatccacttctgtatttgccaggcactggcatagtctacaaaaatttcatcatatcaagaagacttgtcagattgtaaaaatcctgcctacaattccatctggcttggattgagagatctctcttagtaaataagatagaagactgatcctttacgtgtgtggccacacatgggcatttctgcactgaacaccagagttcagtggctaccagtgatatcataatgtatgttgtaaca

SEQ ID NO: 53782 - DNA, 352 bp, Mus musculus; identical to SEQ ID NO: 53781
  source 1..352: mol_type = other DNA

SEQ ID NO: 53783 - DNA, 375 bp, Mus musculus
  source 1..375: mol_type = other DNA
tagatattttcttcatttacatttcaaacctgtactgggcatatgatctttgcaataccaagcattgatggccgactaggccatccccagtgttccatccaatagatgactgtgagcatccacttctgtatttgccaggcactggcatagtctcacgagagagatgtaaaaatttcatcatatcaagaagacttgtcagattgtaaaaatcctgcctacaattccaggcttggattgagagatctctcttagtaaataagatagaagactgatcaggcctttaagtgtgtggccactgggcatttctgcactgaacaccagagttcagtggctaccagtgatatcataaagtatgatgtaacaaagccctctcaa

SEQ ID NO: 53784 - DNA, 477 bp, Mus musculus
  source 1..477: mol_type = other DNA
aagtgcggtgggggtggacgcccacgcgcactcaggctctgctgggctggctctcggaggggacgctaggccgggagagcgcagcggcagtggcgcctgccgcttctgggtagcaaggggagtctcggcgcgcggcagggaaagcctcccccgccgccccgccgccccgccgccccccattcttggggctggggatttgttggccgacctagccgtcgccgctgcggagtcggtctctgaatgctaactcggccggagctggggggggggtacgaggacacgacccgccacccaggtggtttggggttcaggccccaatgcacccggcgagggccggggaaagtcgggcgaacctttcctggccccctcccgaaaccccaccgcggaggcgccgcagcggagggtgagcggatgcgagagctggaggcggcggcggcggcgggcgggcgggcggctgtcgctcgagcgctgcgcctg

SEQ ID NO: 53785 - DNA, 269 bp, Mus musculus
  source 1..269: mol_type = other DNA
ttcaaggcctctggagctgaggagtgatccgaagcccctgcagctctgtgtctggaccctattgtatagatcaataaatcaagatctcactctgcagaggggatttccactgagcacactcatgctggattgggggggtgccattccaccacaggacgtctgtccttgggaaatcagagaccctttcccgggggggtctcatgggaattcctcctcaggctgtcagatgccttctcaggacctttgggtggtgcacagttacagggcac

SEQ ID NO: 53786 - DNA, 254 bp, Mus musculus
  source 1..254: mol_type = other DNA
ggtccatgggtcgcgctctgcctcccagagtgcgcctttgccaggacttcggtttgggtttgcttcgctccgatccaggccgaagcccacactctggagactgtacgctgtcctgctggccggacttgtaggctggggtccgagtacccagagtgcacgcgcacgtgccaaaggccccggcccgcatgcggtcggcctctgcggcggaaacacggttgccgcgccctgggttgagtgaaagggaccacgccgcc

SEQ ID NO: 53787 - DNA, 491 bp, Mus musculus
  source 1..491: mol_type = other DNA
taaaatcatattcatctttcaaggtcatcaactgagaagttgtacttcttgccttacatcataggtaagaggctatgagccaagttattcagattagaaaatattaattatttcagaacgaaataattaatattctatcggatcactccttgtgtacgcagtgtttggaggcagagttgttcaatacagtaaatcaaaaaacaggataccctgttatatttcactttcagacaatggatacttcgtatatataaaaataagtaaaacaaatattttagacacactaaaatttgcttcaatagcaggtactcagcgtctgtgtactccagagagcaaaagctagcccagcgctttccatctgtcagtcgcagcgggcgggagggagtccacacccgggagtaagcctcactgtgggctttcgagaacctgcaaccagtggggccacctgctctgaccggtcgttgtgggccggcgggacagaaccgccctgt

SEQ ID NO: 53788 - DNA, 406 bp, Mus musculus
  source 1..406: mol_type = other DNA
ccccaatgtaaatcaaatatgacttttgactggattttgagtttaaacacaaatcaatttctaacctttaaatatgtatttaataatagtgatgtcctgaatatttatgagatactaagtcttcaaattaataaagactaaatttttagagcacccgactgctacaatgtacttacatataataaataaataaatctttaaaaaaaaataaaaaataaaaaaaaaaataaagactaaatttctgcatgtttgagaaattgtatggtgtaggaagagctacaagctacataaagcccctccacggaagggcgcatgtgcgcaggccccatgggctacaaagtcagctgaggacgtcaactgagcacgtcagcagcgcaaaagcacaaagcggctgctgcgtcagggt

SEQ ID NO: 53789 - DNA, 413 bp, Mus musculus
  source 1..413: mol_type = other DNA
taagttagcatttactcaaagcttaatgtgtgaatgctcctcaccacactgtgaggtaagtattaataacctcctcttacataacgtcttaataatattaaaattaggatcagcatctaaaacatgttttctcacttgattatatggcttccctgtgcagctgaaaggtcctagtgtcactttaacatatgtactggggagcatggcacacaatacagttattgataccccgaattttgtagaattgcacaatgcaaggaacatgtcattcgagacattcctcttcaataaaaagggaataaaaattaaagctttaaaaggattagtctaaatgttccatgtggagctgccacttcctggagcggaaacagtggccagcctctagcctctgagtcgcctgcgctgcgtgggag

SEQ ID NO: 53790 - DNA, 515 bp, Mus musculus
  source 1..515: mol_type = other DNA
ggaacccacagacatgtttaaaggcttgcagttcgtttcaaacttttgtgtcgttgctcttgtcccacaattgacaaaaaaaaactcccacgcgtcgcgccagggtcgcctatgggcggagcgtgcgttggacagtcacagcgcgcggtcgccgcaggccgcctttttggggccccgagaggagagacgggtggtttctcctcccgctgcggtcgcctaggcggggaaatgtgacgcggccgctggactggcggcgcggcttccggcgccttgcgcccacacagcacagcgcggggaacggtcgcaggttgcctttggaaagggcctcccgcgggttccctataacccgccggccgggcggccgctgagcagtcgcggaagcttccccacttgagtggcggccggcccgcctctctgccctcccgccccacgctcgcctccctgcggccggccggcccggccctacatgggggcgggcctccgcagcttgggctcggcttcctgttcagaggcgg

SEQ ID NO: 53791 - DNA, 426 bp, Mus musculus
  source 1..426: mol_type = other DNA
tgagcatctgttacacctgcgagagatgaagctaaaatagacgcttttaacagttaatttttcgcttccgaatctatggaggtggagggaacccacagacatgtttaaaggcttgcagttcgtttcaaacttttgtgtcgttgctcttgtcccacaattgacaaaaaaaaactcccacgcgtcgcgccagggtcgcctatgggcggagcgtgcgttggacagtcacagcgcgcggtcgccgcaggccgcctttttggggccccgagaggagagacgggtggtttctcctcccgctgcggtcgcctaggcggggaaatgtgacgcggccgctggactggcggcgcggcttccggcgccttgcgcccacacagcacagcgcggggaacggtcgcaggttgcctttggaaagggcctcccgcgggttcc

SEQ ID NO: 53792 - DNA, 574 bp, Mus musculus
  source 1..574: mol_type = other DNA
aagccggtatccagggctagctgccgccgcagctgccgccgccacagcggctgcgggcggcgggggagccggggcagacgcggagccgctgctgctgcctccgccgccgctgctgccaccgccgccgccaggagggatcagctggtggttgtccagctgcactggggccatggcggcgtacagcccggctcggggcaaccgcctgagatgcggccctggagcctcctcccgggctcggtgaccgcaccgaggcgggcgcgggcagagtggccgccgcctagcgccaggccgcctctgaacaggaagccgagcccaagctgcggaggcccgcccccatgtagggccgggccggccggccgcagggaggcgagcgtggggcgggagggcagagaggcgggccggccgccactcaagtggggaagcttccgcgactgctcagcggccgcccggccggcgggttatagggaacccgcgggaggccctttccaaaggcaacctgcgaccgttccccgcgctgtgctgtgtgggcgcaaggcgccggaagccgcgccgccagtccagcggccgcgtcaca

SEQ ID NO: 53793 - DNA, 361 bp, Mus musculus
  source 1..361: mol_type = other DNA
tgtgcttattagaagcaaaagcaggagctctctcctctctcagtgtctgtgttttgtatgtgcaaatactacaggcatgccttaggctaggccattgagctgagccatctttcagctctgaaatcaagcactacacaaactagctgtggtggtgcattcctgtagaaatatcagaagttcacatttcttttattcaagactatgtttcaaaacaaaaaggccctgtagatcattgtgcgacacagtgcttagacttatgactgaggcggccacgctctgcgggtcgcggaggcgggcagaggcggagccgcaggagcccggcccggcggccccaggggcggtggcagcccagcaggcgtct

SEQ ID NO: 53794 - DNA, 505 bp, Mus musculus
  source 1..505: mol_type = other DNA
aacaacagacacacatattctgcatctatatgtttatgccttttgatttgaaactcttatgatcaaaaacttagatttttaatatattatcttccccttgcttaaatagagtaaattctattctaatcggatcaattctgattttaagctattgtaattttcagttcaaaaaattttgagttttgagactttcctccccatttgtttcaaacaaacatgcttacaaaaaagggctacaaatgacagctgtttttaaatccttgctgagaattccccgattctcagtatggagagtatgtttcaaaaactgacgttatattagttaaatactatgtttcgcgtttgctgacgtgtgcgcacgcgcacgctcgcacctgcgcctgcgctcctggactgactgcctggcggggcggggctggcggggcaggggacaggatgctggctccattctaggccgctaaccgccagtcgccttgcgctctgtggcgcctccacattgcctccc

SEQ ID NO: 53795 - DNA, 388 bp, Mus musculus
  source 1..388: mol_type = other DNA
tcactatgcctttaagactgacgaagctgcttaaagcgcctccctcaaagtggagtgggaagcagctccccccacccggctgggtgcaggtggccaaaccctcaggacctggcaccctcgtgtcacgtgacatgggtcagctgggtgcaaacgcctagcaccgggaagggggaggccggtgacgtcaccatccgggcactggatgtcaaactagcgacgcggctgcagctttccggaagcgatggtacgatctttccctaagtgttccaggcgacggggccttgtctgggccccctagtggcccacactttctttccctcaacagcctgaggtggacagggagagggggcagggcccaggcaggggaggggccgggccgggcgctgag

SEQ ID NO: 53796 - DNA, 436 bp, Mus musculus
  source 1..436: mol_type = other DNA
tccggaagcgatggtacgatctttccctaagtgttccaggcgacggggccttgtctgggccccctagtggcccacactttctttccctcaacagcctgaggtggacagggagagggggcagggcccaggcaggggaggggccgggccgggcgctgaggggagtctgcgctgccgctgctgttgctgccgccgtcgccgccgcctccgacactgccaccgccaccgccaccaccaccggccgtgcgggtgaggctgtggtacccaaggctgcggaagctagagtccgccggtggcggagccgcaagctctcggtaaacggcccattggggcccctgcctgcaccggctcccaggcctcgcgggagtcggccgccgccgcctcgccctccagggaggcggccgcctttaccgccccagggcttggggtggtgccgctg

SEQ ID NO: 53797 - DNA, 458 bp, Mus musculus
  source 1..458: mol_type = other DNA
ggatcctgtttaaaaattaatgaataaaaatatggatatcatttgaaatgtaaatgaagaaaatatctaataaaaaatagaaaataagcatttaaatgtttaaatattacaaagccactaaaattgaagaaggcttgggaaaattcctgtggtatcttaagtatgtgtgaatatttgcacagaaaatatgccctgtcaacatgttgacatgtgactcaggacccatggaccactctcagtggacccaagtgggtactttgagccccagtttagtttctcagaacatcaccaactgagaagagatgacagtattctggaatgctctcttcaaagccaggatataagagctagcacccttccaggggatgggcatatatgttgaaaattaatagttagtcatcactgagaaccttgactccctatagggatctcagtcaccaggtcagtgtcagagaccg

SEQ ID NO: 53798 - DNA, 286 bp, Mus musculus
  source 1..286: mol_type = other DNA
ggagacacaggttgtgtccactgtgccaacagccacaggctggtcgagagaggctccgggtcccgggagggtcctgaggcaacggcgatctgaagcctatcttcacaagatggccaccttcagggctcattagttaggccatcatctccacgcccggggacggagagctagtttaaagcttagggccttaaggctagaggacggtcagcaatcatttctcgcgagatctcgagataacggcagtggccggccgcccgggagaggagggcacacgtcttacgtgctg

SEQ ID NO: 53799 - DNA, 452 bp, Mus musculus
  source 1..452: mol_type = other DNA
aagtccaaaggggcacactatgtcctagagaacttgcaacttggttgatattcttgaaatagctccatgacaaggaatatttttgttatttctactactggagagtattgtttactgtcttagaaaatcttttatagtatttaaatgaaccattgtgatttaccaactcactaagtttttatttctcagacacatcacatctcctccatgtgctactagaaatgtagtagaaactccaataaatatttgagtgaactgtactgtttaagcaatggccaccattttaagcagtagggagaaattatgtgccttcccctttccttctccagaagttacctttgtgctaaagaagagctcacctaaatgacaaaaatgttaattgccaaacaatttgtggatttattaacatctgaatcaaaggcaggggaatgggcacagagcctcctgcccat

SEQ ID NO: 53800 - DNA, 495 bp, Mus musculus
  source 1..495: mol_type = other DNA
gatcaggaactagaacataatattcattttgaaatgggatgtcataagtgtaggacaatagtacaatacaaaactagtatttatattgtatttcaggagataaaaagcacattatgactcatttagtcatgaaaatcctgacagaatcttagaaatatttgcatattcatgttggttgcagcaatattgcaatattcataattgccccaaagctttacatggttacacgttataggtgaacctcaataattttgcatcataaaaatgttatggtgatctgctgcctgatggtatatgtacactgagcaggtcgcttacagtaagtaaccatcttcctgctcagagattctcagggggaagtaagagttataaaatacttttattctaacaatgtaaaattatggtctcacatgttatgattcttcaaaaaactaaactaaaagttctggggactatgaagttcagaagaatatttccagaaatacttacaatgtt

SEQ ID NO: 53801 - DNA, 471 bp, Mus musculus
  source 1..471: mol_type = other DNA
attcaatggatttaaagtctctttacgtctagcagcaatagaaactgcctcatcttcattaaggaatggcaaggtgaaacacggtcttgagtgacaagcacttctccacttggtcgcagcttgggagtagaggcgacgacgggcagctccgctagccgacccccgcgcccgccggttcttcgtgacgttgcgggcgctgcgcgcaggcgcccgcggtccacgcctcccaacgggctggaggggcggggcctgcgggtctcgctgccgtgcgggccgaaagggagcgcgccaggcgggtgctcgggctcgggagcctggcggctgctgaggctgaggggaggagctgaaggcagcggtcgcggctcccgcccgcactgaacgctcatcccgcgaagccccctcccacactcgggagggcggcggcggcgggaggaggaggagaaggaggagggagcgtctctgccgccgcct

SEQ ID NO: 53802 - DNA, 522 bp, Mus musculus
  source 1..522: mol_type = other DNA
tagattatcatctggttgtcacaggctctcacatgacaataaaaatgtgtctcttatatttattggtgatctaactttgctcccttagagtttataattatttcctgtctccagacaggaaaggatgctctcgttagagtctgataatcctagataatcatgttagtatattggctggtttaaaaaatgacaaagggaataacttataagcaatagacagttttaaatatagttttaaaggctggaaaaatctgaatcaagatactcacaggatcaatatcccatgagagtgtcctcctgagggaactagccttgtgtactcccatgtagaattcatttttctacataattgtacttaagtctttttgaaaatttttactggacaatttctgtctaacagattcctaagtactttatacttgcctttatgtgtgtggccacacaggtgggcatttctgcactgaacaccagagttcagtggctaccagtgatatcataaagtatgttgtaacaaagtcctct

SEQ ID NO: 53803 - DNA, 378 bp, Mus musculus
  source 1..378: mol_type = other DNA
taagacagttcaagttatggtgaccgcaaccataaaattattttcattacttcatatgttgcaactatagtaagttgtgatatagacatgatttccacttgtctgaggtgacccaagtgaaagatctcatcttgattttaaggacattaaacaagtgaatgtttctgatgagatctgggctaagagattaatccaggttcccaaagggtaggaaaattttcacctagctaacacctcccatctttccaatcaaagtagtgagttttaaactttagataataagaaatgtatataccacaaatgggtatattcctattacattaattcacaaaacaataaaaacaagccgtgactgctgtagtgacgaagtcacggtgc

SEQ ID NO: 53804 - DNA, 469 bp, Mus musculus
  source 1..469: mol_type = other DNA
aagtctggtataattctaataggcctgccttgtcaggagaaatttcttttctcgttttcttccataattttgttgaagaacttgtagatgatcctcatatcaatgtactcataatagtgtcctattactttgagtagtgattaggtataatatctaaaatacaattcagcatagtctaacagtataagagaagggagtaagcttaaaacatttatctttaagtaagcctcctattttcaaggagactatgtagttctagtatattgacccctagaaatatgaaagtgatactttttgatgaataagggatatctgagattctcaggcagtcttatctggactcccttcaagctcaaagtggagagctttgctgaccaatcagggctgaggggtgtggcccaccattgttctgacagggatataagcagggtgctcagagctcttgggccagtctctggagagctctgct

SEQ ID NO: 53805 - DNA, 378 bp, Mus musculus
  source 1..378: mol_type = other DNA
ctgccagctcgttcgagttccctcgactcggacgaacgaatccattcaggagcaggggactcaacatccctcagagcctcagtgataattttggccagaggaatgcccagggcctccgcgttcaccatcggggcgtgagtcagaactgcccccaagggtcggcagtggagcccactcctggggattggcaccagaacatcttatgcaatcggcagaagattctctcagggccatccctgccctgcgtatggggcttccctgggtaagcaaggatcagctccgcctgagcgctcccctagcttttgcacaagagcgcgctccgccttcagggccgggctcttcccgggcggtacaagggtctgttccaccctgggcggt

SEQ ID NO: 53806 - DNA, 428 bp, Mus musculus
  source 1..428: mol_type = other DNA
atctatcacttgtttttatcattaatgtaagtaggcatgtattgatcacacatagctatgaggtatatattcgattttagtttttatgtatatgggtgtttttacctgcatttatgaatacaacatacatgtcaggtaccgaggccagaagagaccctgtgattccctgggactgggattacagatagatctatagggtaagatgtggttttaaatacatatataggtgttttgcctgcatgtgcaaatataacttgcatgaaattgagtggaaaatattttgtagagggcacagggtcttgacccctggggccaggtcaccctcccagctggggtgctcgccctctaagagctccacccagcttgcgcgcctgcgggtggacaggcgggcggggctctgagtctaggcggccctccagcttaaagcc

SEQ ID NO: 53807 - DNA, 555 bp, Mus musculus
  source 1..555: mol_type = other DNA
tagctaactggaacattttttaaggtttatgaaatatttccattttaataaattttcatagagacttcattccttagtttaagttttcatcagtattaataaaataaactgttttatgtctgaacctaccagacattaaaacaattataaatgattctttgtattgtccttggtgatcattttgtcttcaagtattttaagggcaagatttgtgcaatgtttccctttgtggccccaaagctcttaacagggcattaaggagtcatggaccaaacattttgccctttgtttctaaatgtattacaaagttttgctccaaatgatgtcagtgaaggcacttattaaagtgccacaaagagctgaatcgcatttatgctgctaaaaatcatttaatggatgacagggtagcattttgcacttgcttctcagcttagcctgagaaagcttaatcgttaaacagaatgccaccctgtctttgtatttccaattaaactcagaatattcatgtagcctcttattagtgtacaaatacaaaaacataagaaaacttccgtc

SEQ ID NO: 53808 - DNA, 244 bp, Mus musculus
  source 1..244: mol_type = other DNA
agccagcagggctaacgcaggcctcctgggtgccaggattttaggcacgttttagattcatctcaaacgctttaattaaaaaatagaggcttaagggtcagatttctgttttctgggcattttaactacatttgataacaaaatagcaaaacaatgctatgtcaagatttcgtgagctgaaggtcacaggggcggagggggagggaggggccctgcggactcgaccccgccccgtcgtccccac

SEQ ID NO: 53809 - DNA, 224 bp, Mus musculus
  source 1..224: mol_type = other DNA
ctatgccccagcatagtaacattttaaatgtaaataaagaaaatatctaattaaaattttttttcattaaaaaaaaaaacctttaaaatatttgccctgacacttgttaaaatagatagtgggtctattttaatttgggatacatttctgtagcttcgttgaagcatcctgtcacaagtcccaagccttgcggctgcgcacaaattgttggggagaggcgggca

SEQ ID NO: 53810 - DNA, 234 bp, Mus musculus
  source 1..234: mol_type = other DNA
attaagtgctttttgtttttttaaaatgactaaaaagccctgaattcaggctcagtgtttaagagatccgatgcactcttctagtgtgtgtaagactgagtacaggcctgagaccatctggctactaataagttcatgatcacctcaggatacctgagaccctgggctacaatgttgaaatcttgtctctttgcccaaaagcacaaggcttgtgtggtaaccattgtgacacat

SEQ ID NO: 53811 - DNA, 430 bp, Mus musculus
  source 1..430: mol_type = other DNA
ttatagtatacccgaaagtgctgccaacagacagacctttggcggtggggtgcgggagccagcgcgccagaccccctgcagggcgggggtcgggagacgttttccccttccccttttgaaagggtatggggcttcgcgtggccttgtctagggcggcgcccaggctgcagggtatgaagccggctgctgagggcagaggtctggggccgagtgttccctccccgcgactcagctgtgtccagccctgtcgggatcgatattcccggagtgcgcgagcgcagtcttggcccaccctagggcttccgggcagccagaggctgtcctaggctggcgctcgctacaggcggtgccggacctcgcccagactgagaagggacacagcctggacccctccagtggagccacgactgacgcgagtcaacaaaggtca

SEQ ID NO: 53812 - DNA, 160 bp, Mus musculus
  source 1..160: mol_type = other DNA
gtgtgtgtacacatgcatgaatggagagatgatgtatgtatgtatatatatgatagattctatgtatgtatgtgtgtgtgtgtgttctacagggacagatgtacccaggtggaggccttcaggattctttaaaactcccaggtggacagaggcagccgcc

SEQ ID NO: 53813 - DNA, 527 bp, Mus musculus
  source 1..527: mol_type = other DNA
aatgtaaatgaagaaaatacctaataaataattgtctgtgttttagaaatttaggaagtgaatctaaaggtagttaaggtttatatatattcagagcacaagaaaaatatgcaattgaaaactcttgtattgtttcattaatttccttcagaaggctacaaattgtctaactccagtagccagtgtagatcctgtgtaatcagcagctacatctggctagcttcagttatggtacccataacaaggttattgaaacgatagctttctgattcagttttggaagtcatccagagtttgatgaacctaaatgatatctcctttaatagtcattttaaaaatagcatgatgaatgaccaccaatcgaattatttgaggaaatttcacctattggtaagtcacaggaattgtgacttccattttcttttcttatggtaaataagacacataccaactttgacatgttaatctgtatggataatttgcaggctgaacatccaggtctggggcatgaacctggcatacaatgt

SEQ ID NO: 53814 - DNA, 479 bp, Mus musculus
  source 1..479: mol_type = other DNA
atttactgattctcagtcccaaatgtcaggggggaaaagattcagaaaagtgtctcagtgagtatttttaagtatttctaggaaaaattaatgacttgatcaacaaggagcttacctagctaactaatgaagtactacttagaatagttccataaatgctaccttttaataattgtttgtttgtcatctattggtatgtagcacaggatggcctacttggccatcaatgggaaggcccttggtatagcaaagatcatatgccccagtacaatgtaaatgaagaaaatacctaataaataattgtctgtgttttagaaatttaggaagtgaatctaaaggtagttaaggtttatatatattcagagcacaagaaaaatatgcaattgaaaactcttgtattgtttcattaatttccttcagaaggctacaaattgtctaactccagtagccagtgtagatcctgtgtaatcagcagctac

SEQ ID NO: 53815 - DNA, 304 bp, Mus musculus
  source 1..304: mol_type = other DNA
aacatttgtaagtaccattttcagagaattcataagtgttatttaagaaaaattgctacttcatgaagtgggcttgtttacgtagcaaaagtgttctttatatgaacaaatgaaatgatttgtagttagcataaagatttgtcccaaggatagttgtctttaaaagaaatgtctgggagggaagagaagcttatacacctctcccatcggcaagcctctgtggagctgtacagattcatttatagttgaactgagtttctaaactcagcctctgcttataaccccagtaattcagaaattctac

SEQ ID NO: 53816 - DNA, 404 bp, Mus musculus
  source 1..404: mol_type = other DNA
tacaccatcatgtacgtatatacacatagactactaatgattgctgtgtatctacaatcttcagtatccacataacaagctggatgtggtcacatatgccatccaaccagcctagctgaatttccatgctcttacagttagtgagagaccctgtctgaaacacatttgtttgagtgtgtaaacacacataactatgaacaggtacacatacacagataaaataagctgtccagttgcttgtgtgtcaccccaggctggctttaaaagaccacaggcacctgacatactgtggtaactcaaatgtacatagtgctgtggattttttaattgtgaaacaaaagatgggctgaatttgtaggttacactcattaaatccatactctcagtataaaccattctaaaaa

SEQ ID NO: 53817 - DNA, 357 bp, Mus musculus
  source 1..357: mol_type = other DNA
actttgctcaaggtccattttttcctatatctaaaatacctgagaataattgattccatgcatgtaatgccactctcatcatggtagttaaacatcatactgaataggggacttgtaagcagtttattttttaaggcttttgtcttcagctattaaaccattgacatcaaaagactgcaaattgctctgctttcaggtccctgattgccttaattgtaaattttacagcatatggttccttaaaatataatctaatgctttgaaacctattagaacatgcattctgatccttaaatgcaaatgggctgtacttacactaccctcccattctggggaaaatttggccaggggaggtag

SEQ ID NO: 53818 - DNA, 508 bp, Mus musculus
  source 1..508: mol_type = other DNA
cagatattttataactaaagaggaaatctctggggttgctaatttcaaaattctgagcctgtttaagaatacttcaaatatatactttaaatcaagccaattaatacaattacagtgggtttaaataacacatatacattggttctgtttctgtaaaacatagtttttggttttttttttaaatgagaaacgtggcatatgtaatacatataagaaatgcaactttaacacacacacacacacacagagagagagagagagagattagtatggaaatcgttagatttcctttatgggcgtaacagaaacatgaagcaggctgcaacttgtatctttcccctgcagtgcccaaggccggagtccgggctatcccagggccgcccggagtcttcctggacctggaaccccggaactgcaccgccaggctcaggctaggcagctcagagccagtccccgcagcgatgggcgggcgggcgggcgggggcggagcgcagaacagtgctgcgcg

SEQ ID NO: 53819 - DNA, 395 bp, Mus musculus
  source 1..395: mol_type = other DNA
agtttagtttattgccatgagtgttattaaaataatggcacaggaccagtaagtggctcagtgagagcacttgcctagagctgatcctgagagaagagaaccaactccctcatgttgtccacacacacgaatataatttgagagagagtcttttagattgacaaatacaaaataaatagttttcatatataaggaataactggagacccaagtttggtttgaaacgaccaaaacaggaagaaaaaaagtgtcattctccaaaacttaagtacactcagtgcaccccagagggtgtccctgccctgtggcagccctgtccagctctagcccggcgttgagcaaaccctgggcagggcctgcagctgctgaaccggccaatgagcgctggctgagtg

SEQ ID NO: 53820 - DNA, 589 bp, Mus musculus
  source 1..589: mol_type = other DNA
aaacaaggtggttgctctagttagtctagagaataactattctagttattagaatttcttccaaaagcttttgtcttctgaagaccttgtcctaattcggagctgggcttgatcctacagcattaaaagggtacccttggtacaccatctgcagctcccacagtttatttgaataatgcctaaaagactctggggagttgtgtgtgtgtgcgcgcgcgtccgtgtgtatagacagtgacatgactttgtaactcctgggtacccccactttactgggctcagagaggccacagacccctgtgacttcaaactctgagcgtgggagcccttggtagctatgccgaccccagacagtctgaccaggtacgcttggacacggccagcagctcggtggcgcagtggaagggctagccgccctcctggcagagggaggatagagctcgccccgcccggacagccagcctggtggccttgctgctcctctaggcgggggagggggtggcgcttggggatcctgcgcactgcgcgtgcccctcccccgcagcttggcgcagccctggccaggcgcgagcagcgggaggaggagctg

SEQ ID NO: 53821 - DNA, 403 bp, Mus musculus
  source 1..403: mol_type = other DNA
aacaggttgtttatatgatagggtttatatcctctattagatcttttggaagagattgttctgtcattggatgcataagctgagagattcaaaggtactagtaaggagacaatactaggtttttatcctaaatacttgtccaattttggagagataagtggaagcttttagacatccctcaaaggattggaagcacttgcttgatggcttacaactattagtaaccaggagatacacaaatttgttttacaaaatcagcaagatttttttccctagcaatttttgtcataaaacaactccagagcttaaattttggaaactttcgaaatttgagctagcccagcctagttcactagaggacggggccctcggtgagagcacctgagctggccagcccccagct

SEQ ID NO: 53822 - DNA, 309 bp, Mus musculus
  source 1..309: mol_type = other DNA
aaagccaatgaaaatggcttaataatttctgagctatattcaaaaacatgcagtttatttgctggcaatttccatcagctaatgtctcaagggagaattcttttggcctaaagtccaagcatagaatgttctttgcctgtggggttcaaggctccctgccaaactggcctcatgcaaggaagcaagtagttctatcagtgccagctcttcacccagggcctggaacaggctacatacctcagccatataccaagcctctggctgttaacttaattcagtatattatcactgatgccaccccttggaggt

SEQ ID NO: 53823 - DNA, 291 bp, Mus musculus
  source 1..291: mol_type = other DNA
gcgcacgcgcttttgctttcataagaaaaaagctggggtgggggaccataccccctcttcaggtgccaacggcgctcaccttctcggcccgggctgtcaagggagggctcccaggcgcgaccgacgcgttgccctccccggcctgacgattggttgccggtcaccattggctggccctggcattctctgattggcaagcatatgctacctacccctaagaggcccgctctttagaagcttgctgtcctttgaagttgaaagacaactagaagctttcttcttacgaagaaa

SEQ ID NO: 53824 - DNA, 491 bp, Mus musculus
  source 1..491: mol_type = other DNA
aaagttttttttccaaataattctgataggagcatttttgctcacaattttattatttatccatgcttcaagtctaaacgtcagaaggactttgccggagcaggagccagtgcacctcgctggcccaagcgcctagcagggctgggacgcctcagggcagcagcgcgcgcagcaggaggggaggagaacccacctgaagcgccgcgccgcgcgtgcgggagcttgaggtggagtcgaagccggtggcgctcgtgacggcgcccagcccgccagaagatcgcgcggcgagcagacggcggggagtcagcccagccggtgctccgcgccgcctcggctgccgccgccgcccagcagcctgtccagagctgaggcctgaagggccaggcggccagggccgggggcgggagcagagcgctagggggcggccccctcggctcctcggaaggcccggccaggagggcggggggttaccaccctagccagactcgccc

SEQ ID NO: 53825 - DNA, 261 bp, Mus musculus
  source 1..261: mol_type = other DNA
atcgcgcacgcgcttttgctttcataagaaaaaagctggggtgggggaccataccccctcttcaggtgccaacggcgctcaccttctcggcccgggctgtcaagggagggctcccaggcgcgaccgacgcgttgccctccccggcctgacgattggttgccggtcaccattggctggccctggcattctctgattggcaagcatatgctacctacccctaagaggcccgctctttagaagcttgctgtcctttgaagttga

SEQ ID NO: 53826 - DNA, 353 bp, Mus musculus
  source 1..353: mol_type = other DNA
tttagtattaccctaattataaagtttctaactaggcaaaatttctgaatattcgaagattttgtccactgctcaaatctcgggccggagatggggcgattacagccctggaggactcccagcgaacgcgagcagccgggagccctctcatcgcccccgctgctgacaggcagcgggccgccatgacagcttgtactgctttcttcgtaagaagaaagcttctagttgtctttcaacttcaaaggacagcaagcttctaaagagcgggcctcttaggggtaggtagcatatgcttgccaatcagagaatgccagggccagccaatggtgaccggcaaccaatcgtcaggccgg

SEQ ID NO: 53827 - DNA, 580 bp, Mus musculus
  source 1..580: mol_type = other DNA
acatatatacatacatatatatgcatatatatatatatatatatatatatatatcgcttaggtgaacaaattgtgccatttggttttatataagttcatgcaagacatacaaatagttcttagaaactaccactatatggttagttagatacaatagttacatattatacaatatatacaatagctgtatatacaatgtctagtcactcatatagttatatgcaaaatgcattaaatataaggtacacttaatacagataaaatcatttacatattaacatgggcatggtggtacatgtgatcagcctgggctgtacagcatgttcattcctgttaaatacacgcacatgtatttatgttcatacggacttcttattataatgcattcccacgatagaatattgttccatgagggcaaggattccaacgaaataaacccaggcttacattttctgatgcccaccacgtgcaccaggcatgtacctgtatgggatttttgtccctgaaacccgggccagaggcgcagaagtagaccctctattcaggcgtctatggtataccccagacccggccctctaag

SEQ ID NO: 53828 - DNA, 393 bp, Mus musculus
  source 1..393: mol_type = other DNA
gtgttcttacccggggtttcctgttaaccaggcttgcctcgcatgcagcaccatgcacataagcgcagcttggggcaatctattaaaagtgtacaccaccacacctggtggacacaaccaagttgagctgctgctgctgctgctgctgctgctgctgctgctgctgctgctgctgctccaacagcttcattcagtatttaggagtcagaggagtgctgcctgcagtaggatggagcaataaggcaggcctgcctcttttttattcatgaattactgcaagatcattcattattcatgaacatgggggcttcgtgattcacgatcgggaagaatggccttgaggtccttcccagagccacttggtggattccttctaattgattcatgagtggg

SEQ ID NO: 53829 - DNA, 329 bp, Mus musculus
  source 1..329: mol_type = other DNA
ctaggatattctcctgttgtgagaggaaaggataagtctgttaaatgatagacccgatgtctatcctagcaaggacgactttcatggctgaagaagtacttgccaatcaatggcccttgcttgaaaatctcaggaagtctgcagaactgtttctacagagaagaatgagagcctgcgccttagtggagtcctctaaaaaggtattcagcgatctcctgagaagcgctcagtgaagagaaagctagatcatgcttcttcagctttctcagccctgacgcagggagcaaatttgattggctgagcgtcagctttttcaaaagggtggccac

SEQ ID NO: 53830 - DNA, 270 bp, Mus musculus
  source 1..270: mol_type = other DNA
cctgcgccttagtggagtcctctaaaaaggtattcagcgatctcctgagaagcgctcagtgaagagaaagctagatcatgcttcttcagctttctcagccctgacgcagggagcaaatttgattggctgagcgtcagctttttcaaaagggtggccacggaactttcgcctgttctcccgtttaccaccagctagtaaatttctagcaagatcaaatggcgccgttccagggccaacgccacattcctgctgggcacagaagggagccca

SEQ ID NO: 53831 - DNA, 408 bp, Mus musculus
  source 1..408: mol_type = other DNA
acattgttactcatgggccaaaaacaatacagttatctgctttaaggtcacttaaactggacagactcagtatttgttatgcttccaacaaacacacagatttgtctggaatgctgtattccatcacttgataaactatttgagaaaaaaaccttttatttcatgtatataaatgttttccctgtattcatatatgtgtacctcttctgcaggagcaatgagtgagccatatctctagcccatacatttggttttgatggatgagaaaggtaatacgttaggctaacaaaaatgccgctttcatacgtgtaaggcactaatgtcttagttccaaacaagagagttaacccctggtattggttgggggctctgcttccgtttccgggacagaatccggaagtgccagtt

SEQ ID NO: 53832 - DNA, 370 bp, Mus musculus
  source 1..370: mol_type = other DNA
tgaacccagagctctgttttagacttgagattatcactatgccaaatgttaagtttttttaagacaatgtttcctgtcctagaacacactttgtacaccaggctggcctcgaactcacacccctaaagagcttatgttttgaggccacacaatctctgaaaagacagcttccttagaaagtttcagttcttgttacttctgtatagggtacagaaacttcctaacagtaaacaactgtgtggaccttaagaaggtgttggtgaaagatattttacagtagtgtattcttagtacactgtagctgtcttcagacactctacacaactaatgaggtctcacacagttaacccaggctggacttgtgagagtt

SEQ ID NO: 53833 - DNA, 226 bp, Mus musculus
  source 1..226: mol_type = other DNA
atgcatgcatacttttcatgtgtacttcacatataataagcacatgcctgtaatcccagagttaaaacttttttttaaaaaagtacctcagaaataaggatcactgactccaggggttacgtctgagaaacttaaaatccattttccaacacccccaagtaaagatttttttaaaaatattttattttgttttattggttgttttatttatttaaatctaaaatgt

SEQ ID NO: 53834 - DNA, 449 bp, Mus musculus
  source 1..449: mol_type = other DNA
ttgtggttcattctcttgttgagctacaaccctagaactaagcttttaaggaagatttatctatctatctatctatctatctatctccaatagacagagaaaataaaagttttctgaaggaaatgctccaaaaaaagaatgtaggtacatacacatgtgtgtgtctgtgccttttcggtaaattcagtttaagaattatattcatcctaaaatatgtccacgactacagtttcttagagctggtaaatactgaacatcatttagtctgagtccaccctgttttaaagaccatcaaattaagatatatgaatagtcctttaaaatgtgctttactgctcagatcagtcttaaatggccagaaaatacaagcttctttattctgttaaagtccttaaaacgcagtagtcgccctgactgcgcctgcgcgccaatcagggcatgatcatcct

SEQ ID NO: 53835 - DNA, 410 bp, Mus musculus
  source 1..410: mol_type = other DNA
cctgcatcatcaggaagctggtgggcagcagttgcctcatcccatccccacaaggggtgtgggctggcctgagttaggactccagggtcaggaagcctaggtttaaatccctgttttgtcctgtgacactaacaaagatctttacttcagttatcttgtagctgatgatatcttcaaatagcctcaccggtgtgtgcagccacagcaaggtttggggtacctaggctctgtctgtggataagtcatagacttatccagtgtatcaatttcagatccacaggaatgcctttcttgtgagattggagaggcacaaagctttaggcgctctctcttctgcccttcaaggccgccaggaagggggcccgcccctaggctaatgcgtccaggaagcctggaggcagtgatttccc

SEQ ID NO: 53836 - DNA, 324 bp, Mus musculus
  source 1..324: mol_type = other DNA
tagcgctgcaggaaatgcttctgcattgcatacccagagttacatatatacctggatgctacatatataggagatgtctccccgggaacactgcaggaaggagaatttctacattttcgttactacaggtccggaccctcaggactgcgcatcccccgcccccatcagagggggaggggaagaggttgcggcgcggcgcatgcgcactgtcggattcagcaccgcggtcagagccttcgcctccgctgccggcgcgcagcgtccatgctgccgtgagtccagtcggaccgcaccacgagggcgcgaccatacgctctgcggcgg

SEQ ID NO: 53837 - DNA, 348 bp, Mus musculus
  source 1..348: mol_type = other DNA
agaactactgatgctcagtaggtgctcaataattgttgaacaaaccaatttagtaaacacagccaggcactattctgagtattttcattgtcgggctgtgacagatctaagctgtgtccagtgctgtaaatttgtactgcatacagacctgcccctccccccaccttgggcagtgggtatgctagataaagtagctgccatgatgccttcttcacaaattggtcaccatagtcaagattattgcctgttcaagaccagcctggtgtttaaagcaaatttcaggtatggctatgttgtaaaaccttgcaatgagaatttgtctcctaagcattgagtgaaaaactaagt

SEQ ID NO: 53838 - DNA, 263 bp, Mus musculus
  source 1..263: mol_type = other DNA
tttaattaattattatggagtctgttcagaagagagcttgcaatccctccccaaaggggatagataggctgtgtacttgtaaaacccagggacttttaatatgtatagccctggctaagcgctgggattaaagggctatagttctcaactatagtagtggtactattgctaatgacaggcagtattctatagtctccagcttcatagccctgtgagacagataactgagaaaactagggcatgtgggttcacagatggcttat

SEQ ID NO: 53839 - DNA, 235 bp, Mus musculus
  source 1..235: mol_type = other DNA
tttaaggtaatcctgggctacatgagacacttgaaacaaatttttacagttccagttcaaagtaattttaatagttctactaacggtatggtgtacagcaccacctactttggtgttttggccactgtctgggagaatcctccaatcagctgcgtgaggcactagcgccgcccatatagggcccctgtgcttaggatccttgtggctcctcccatgagagcccacgtgagcggtg

SEQ ID NO: 53840 - DNA, 425 bp, Mus musculus
  source 1..425: mol_type = other DNA
ttgttttattacccaagacaatatctgagtttctcaggctaagtattgaatttgtaaacacaccaaacaattcttcctcaatataataatagtggggtttatctgcatttttaaaatgtgctggcctagtttgcttgttttgagacataatctcaaagcccaggctaaacctcgaatgtaggtgaagatcaccttcaactctgggtaattgcaggcctgtgtcaccacactggattttttttaaaatagaatattgttctattttcaaggctggcttgtaatcctggctaaacaagggcacacaccagaaagttagtctgtagcccagactggttctcagcttaataaacttttccatttcacagatgaataaagttcacaaaggtgaagtaaggtacaacttgttcataaatactgggcgttgg

SEQ ID NO: 53841 - DNA, 306 bp, Mus musculus
  source 1..306: mol_type = other DNA
taatcctttggtctataggcactcttgtgcttttaaaattattaaatgcttaagtgaaatatattgcatacatctatgaaactctcaaagaatagaaatgtttctaaaagaaaaaaatagggactatatacaaactgttggttgctccagttccagggaatcccacaacttcttctggcctttgtgggcaatgcacgcatgtagtccataaacatcgcgcgcgcgcaccgccagctcgcgacgatccgcctgctggcagaccgcggcgtgccaggcccatctagatccataggatcctgccaccgg

SEQ ID NO: 53842 - DNA, 293 bp, Mus musculus
  source 1..293: mol_type = other DNA
cacctgctgcagcccagctgccattttaaaagaatagttttttattgaatacactgcagggtgtagatttatatgtaattttaagctgttttaataaataaaatatgacaatgactgctttctctggaaaggaattgtcttatggtcctttagatactaaaatgcaaaggatggagccaaggcttttccctaaaccctcccattttctgctgtatcaaaaaaaaatggcgcctgtagaaactgctaatttctagtataaaagaaacagtggatgccgtttgttttttttgttt

SEQ ID NO: 53843 - DNA, 369 bp, Mus musculus
  source 1..369: mol_type = other DNA
attttttttaaaatagaatattgttctattttcaaggctggcttgtaatcctggctaaacaagggcacacaccagaaagttagtctgtagcccagactggttctcagcttaataaacttttccatttcacagatgaataaagttcacaaaggtgaagtaaggtacaacttgttcataaatactgggcgttggctcgctgcagtacgtcactgatgcccgccgtttcgggggcgtcgccatgacgggccgttgagcgctctatttaaacttcacaaaattctctgagctactgcccaacccgccggtacaggagatttaccgtagggccaccggcaataactgttagtatgagccgcggcttccggtggc

SEQ ID NO: 53844 - DNA, 304 bp, Mus musculus
  source 1..304: mol_type = other DNA
atcagtgagtgtatatcatatgagttcttttgtgattgggttacctcactaaggatatcctacagatacatccatttgtctaaaaatttcaaaacacagtgtttttaattgctgagtagtactccattgtgtaattataaataaaggctgctatgagcataggaacatcttctgggtatatgccctgttgaacatttattcctcaagaatccctatcagatttaagattggtaaagatcttttcccaaatgtattccagaatctacagttcatactggtgctcataaagcctagcattctagaa

SEQ ID NO: 53845 - DNA, 270 bp, Mus musculus
  source 1..270: mol_type = other DNA
agatgataatgcagtgtctgcagtctaaagctgtaggacccagagcctggcataggcactttcccaaatctctctgccacatgtttccaggaatgtacctctctagtggtatttccttgaaagaactaccagaggaatctccctgcccaggggtcggggtggggattcaaaaaaatctcatctcctttaaacattgaggcagatttttttcaatccttgtggtaatcaaaatattttaggtccgctagcgctgacagcttcaggaagggc

SEQ ID NO: 53846 - DNA, 383 bp, Mus musculus
  source 1..383: mol_type = other DNA
cttaatgcggctgcaatcagttggttgcaatgtaatgttgcccttttcaaaggttgttttcctaaggaacatgtatgcactctagtgcaaaattttacctacaaagccatttggaggcagggactgcacaggcatggtgggctaggcctctacagaatctcaaggggtctgaggctggcctggtctatatgagctcttcacacatgaatgcagtcatcaaatttaaatgattacttaggaattcacattagcagcaagctaagggttgaatctgcttgatgatgcccaaaaggaacactgagcagtttcagtgtgttactcttagaagcagacacaagaaacgaaaggcagtccctgcccattgcacagagattctctgtcct

SEQ ID NO: 53847 - DNA, 248 bp, Mus musculus
  source 1..248: mol_type = other DNA
ttttttttggggggggagagaaaggtaggtacagatttctaaagagctattgtaaatagacattttgtatatagttaagggtaaaatcattagcatacatattagataatttaaatggatatgcatcgaagattatcatcaattttacacctgacagcatgttcgcatctaaaatacagatctaaattgaaaattctcagtagaggaatctcaaatgtctgctgcgcacgccgagtgacgtgatgacg

SEQ ID NO: 53848 - DNA, 344 bp, Mus musculus
  source 1..344: mol_type = other DNA
tgtttgtatgaatttatacaatttggtaaaactgccaccatgtcttacatagtgtagattctttgaatttttgatgaagaggcgctgcacgtaacctggtttgtgtttggcttctttgaaatactacacaaagcaatccatagattcaaagtcttatcttaactggctagcattctctccgggtgatgaaggggcccagagcagtctggtctgttcactcagccccagcagccctgccctttcctagggctggggcaaggaattgctacatacctgggggaaaaaccagaggcttgctttggtcccttccggtaattgaaaggactggccgtcagcgagggagg

SEQ ID NO: 53849 - DNA, 504 bp, Mus musculus
  source 1..504: mol_type = other DNA
ttttaagatttatttatttatttatttatttatttttaattaggtattttcttcactattgtaaagctttaagatcataatggatttaagatcattatcttcatgtgcatcaggaactatacattgacatgacaaaacttttaaagcatatggcattttaatttagttgtaatgcagagaaggaaataactaaaagaacttgtaaaaatttctctccatggttatcatagcgactgctaatagctagttaaagagtttacaggaaactatacttcttttttctctgaggtgaaagatatgtctcactgagctttctctaaaagagacagtgattaaaatggtattttactaattgaaaagaattttttatttacatttatttttttatataaagggaaacatttaattaatgaaaagattttttttaaactctctaagaatgtttttaaattggatattttctttatttatatttcaaatctccccctgaggtgatgtgacagg

SEQ ID NO: 53850 - DNA, 463 bp, Mus musculus
  source 1..463: mol_type = other DNA
catgtgactccactcagagaagattgtgaagcccttcatctgttgatctattgaggacacagtaacgtagcacagtgtagcatttgctatcagctggtactgtacaatgccatgtgatcattcttccagagatagcagcaatctataatagcagcaatctataatagcagcctaatatatatttgagctacagttgtgacagtcacatgaaaaaaaaaaggcactagatgttgattttttttttgtcacaacaaaattttatcctaaaaatttaaaagttgtagacctcaagtagaattgctaccattctttagtaaataggagctaggagaaagagaaaattctgctaaaaatgatattcttctcttaaagaaagccacggagtttaaaaatctctaacacatttgtggaaacgttattatagccctctggaaagctggcaagtgttcataagtcagctcca

SEQ ID NO: 53851 - DNA, 234 bp, Mus musculus
  source 1..234: mol_type = other DNA
gttcatagtaacttgggcaacatgcttaatcttcatgtacttgctcccagagtaaatgcgttgtattcggatagaaaggagacaactactcattccagaccattataagagttatgaacgacactagaagccatgtgggctaagtgtcctgcttccaaaggctccagggccacttggcagtcattagccccagcctccgcgcaggcgccgccagggccacccctgccgccatgt

SEQ ID NO: 53852 - DNA, 581 bp, Mus musculus
  source 1..581: mol_type = other DNA
tctctatttataactcataagaagtggcttttataatgaactaaatttgaaaaagaagttgtgataatcacagttgatttctttttgaaagttatttcttattaaagaaacattcatctgtaagattttttaatacaaaaaaaacttttttaagggactgaatctctttagaaaacaagataatttgaaaagactatttggcggttattgtctagatatgaatatacaagatattttttttagcagcaacttgcccatttaagaagtagtatttttcagcttgtaaagagttttgaatagtattaatttagtttaacctaattttactttcaatgttgcatagaaaatttgtgaatttgttttgctgttttaaacaaaagtgtaaaacacccaatcactttgggattatttacaacactattttcaggcagtattttaaaacaatgtagatgaaccctttatttgacattgtgatttaaccgcagcttcaggttactggaccgctgctgagctgtggagtggtccctgctggacacctgcttggcgttgatagcgtccctctgaggactgctattaagagc

SEQ ID NO: 53853 - DNA, 388 bp, Mus musculus
  source 1..388: mol_type = other DNA
atagcatttgaaatgttaattaaaaaaatatctagtaaaaaaattgaaaagcaaattaaaaaaatatcagtggattttgtgtggtgtgtgtgtgttaggtcaacattaatttaaacacaccagatggtggttggaaaaatgactcatctgttaaaatcacctgtcacaatttatgcaaagggccagaagggtctagcacattcttataatcagggatctggatgctcccttctaatctcttaggtgtggtgtgcgtatgtacattcagaaagagtccacacacattgaaataaagtagtgtttcatatgtttctgttcaagtttttcaagtatgtaagggcttataaaccaagaaattgtcttaaagtcagtcagaatcctcagtcca

SEQ ID NO: 53854 - DNA, 416 bp, Mus musculus
  source 1..416: mol_type = other DNA
gtataattagcttatttttaattgtcaaataattgtttatatttggggtagtaaaatgtgatgttttaatcactgtaaacactgtacgtcaatatccactctttaagttaaaacatttaaaaaacataaaatctagtagtaattcttgacaaaagttatactttccaaaggatctataagacagttaactattgagaaaagttgcagttcttatgatggctcagctccagcaataaatccaccgtatattttagacttggctgaaacgactaagtaaaatgcttcttttgaactgcagttagcagaatcagttaaagcaccaagtcgggcgtgcctcggagttttggcagacagctgctcctgcgcaggtcccagactttaccggccggccgcgaaatctcgcgaggttaggtgcg

SEQ ID NO: 53855 - DNA, 318 bp, Mus musculus
  source 1..318: mol_type = other DNA
tttgaaataatatgcaaattaaaaaatatcagtggattttttgtgtgtgtgtgttaggtcaacataaatttaaacacaccagatgcatacaaaacagtggttggaaaaatgactcatctgttaaaatcacctgtcaatttatgcacaactatggatctggatgctcccttctgatctcttaggacagttgtggtgtgcgtatgtacattcagaaagagtccacacacattgaaataaagtagtgccttttttctagtatgtaagggcttataaacctagaaattgtcttaaagtcaggagcaggatatattcaaacca

SEQ ID NO: 53856 - DNA, 368 bp, Mus musculus
  source 1..368: mol_type = other DNA
atttgaaatgtaaatatgcaaattaaaaaatatcagtgtgtgtgtgttaggtcaacattaatttaaacacaccagaacagtggttggaaaaatgactcatctgttaaaagcacctgttttcttgctggatgctcccttctgatctcttaggacagaataaactcttgtggtgtgcttatgtacattcagaaagagtccacacacattcattgttacgcatatgaataaatacaaagtaggtgtttcatatgtttcacatttgttcaagtttttcaagtatgtaagggcttaaaaactagaaattgtcttaaagccagtagtagaggatatattcagccaatcagcacagacctagaatcctcagtcca

SEQ ID NO: 53857 - DNA, 454 bp, Mus musculus
  source 1..454: mol_type = other DNA
acagaccatagactttgctggccaggctctgggaatggattgccagcacagaggaataaaaagaaatatttaaacatttgacttggcttcttacagattgcaatttattaacagtgaggagtccatataaagttaatatgcacatgcatacatatggatgttaaacaaatagctagatttataaggaacttttagaaaaaaatatatatataggcaagtacacagaaattgttggcatacaactacttgcatgaaatacttgtcattaatactaatcaaaagagactaataataaaattagcaataacaatgcttactgtttatattggcaaaagcagttagtaagtgattgtctcccatactacagacatttgagtgctctctggcctggttgttctctttaaggaaaagaaaatgaaaaactaggtgaactaggttctcaagtttgtgctca

SEQ ID NO: 53858 - DNA, 501 bp, Mus musculus
  source 1..501: mol_type = other DNA
tcacagaccatagactttgctggccaggctctgggaatggattgccagcacagaggaataaaaagaaatatttaaacattagacttggcttcttacagattgcaatttattaacagtaaggagtccatataaagttaatatgtaaacatatgcaagttaaacaaataactagatttataaggaacttttagaaatatatatatatatatatatatatataggcaaagcatacacagaaattgttgatataggcatacaactacttgcatgaaatacttctcattaatcctaatcaaaagaggctaacaataaaattagcaataacaatgtttactgtttatattggcaaaagcagttagtaagtgattatctcaaatactacagacatttgagtgagggttggaacggcctggttgttctctttaaggaaaagaaaaaaaactaggtgaacgaggttctccagtttgatggaggtcattgtgctcatctggtcagaatctg

SEQ ID NO: 53859 - DNA, 270 bp, Mus musculus
  source 1..270: mol_type = other DNA
aatacatctcttaccttaggcaatttagccgtgttgtagtcccaaccagggcaacagaataggctgcagcatctgctgaaaaacgagtccggaccccagctcagtgtactcggagcaggtccagacagtgggcacttcctatggcacagctgacctggggagcccagtgggtgcctcgcaggccccaaggcctcaccctctcccctcccctctgcccaacctgtgggcacaaggtgcatggcaggggggtgtcccgggacctccatgtca

SEQ ID NO: 53860 - DNA, 364 bp, Mus musculus
  source 1..364: mol_type = other DNA
atttgaaatgtaaatgaaaatgcaaattaaaaaatatcagtgtgtgtgtgttaggtcaacattaatttaaacacaccagacagtggttggaaaaatgactcatctgttaatttcttgggatctggatgctcccttctgatctcttaggacagaataaactcttgtggtgtgcttatgtacattcagaaagagtccacacacattcattgttacgcatatgaataaatacaaagtaggtgtttcatatgtttcacatttgttcaagtttttcaagtatgtaagggcttaaaacctagaaattgtcttaaagccagtagtaaggatatattcagccaatcagcacagacctagaatcctcagtcca

SEQ ID NO: 53861 - DNA, 354 bp, Mus musculus
  source 1..354: mol_type = other DNA
gcctttcatttcagaattaaggccttgtttgtgtctaagcatgcatgctttacccagacaagtcttcctgagtacacaataggagcatgctgcttccatgttgtttcccagcctctagccgcctgggacccaggggcttgcaggttgggggcaagtgagatttttcccaccgcctcactgctcctgaagtcttaagggaggcagaggtctctggaggccccagcacacctcatctcgcctcccggatgcggctgcaccagcaacatcagctgcgggcggagcccgggtgactcaggtcggggcccttggtgagagggagcagccgccgccgcccggcaggacccccgcgggagc

SEQ ID NO: 53862 - DNA, 467 bp, Mus musculus
  source 1..467: mol_type = other DNA
gcttatgtaggtgtgcatgcatgtgcacacacatgccatggtgcccacgtggaggtcagcaaattgttaagcacttgtttaatctaggtattaagctgagtgtgtgttttaacaacacaggtacacaggatagtgacactatcccttgtttcgggaatgtcactttaaaaacccaattcaaattactattctgtcagaacttcgaaggctacatgaccctgccctagtgtgtagcagggtgcatggagccctgccacaaagctccaggggaagtcgccttgggtcttccaactccgcgcggagggaggccaggtgtcactcggtgggagtctcagagccgccggccccgcccgcctgcgcccagacgcccccgcgcgctcgggttacctgcggccgtgggcggggcggcccttcccgtctgcgccggctctggcctccagcgcgcggcggccgggaagtgggaggag

SEQ ID NO: 53863 - DNA, 231 bp, Mus musculus
  source 1..231: mol_type = other DNA
ctaggtcagcctgggctacattgggatttcaaactagcctgggatatagtgtgagactctgtctcaaaacataaaaatgatatctaattcctaaccatgtggccttaaggcgaattgggcccttctgattatgcacaatgttagcagaatggcaggctgctcttgaactccctttcggcatccgaacccttgggctttgggccgctagaaggtaggctgctgataaaagct

SEQ ID NO: 53864 - DNA, 304 bp, Mus musculus
  source 1..304: mol_type = other DNA
ccgaacccttgggctttgggccgctagaaggtaggctgctgataaaagctttgcagctgctgaatccggttataagtagctgggtgaagcactggtagcttcgagtcgcctagcggctccggaggtgccagcacttttctccccgggactcacaggcctctggctaccagtggatcacaggtttagagaagccctcgggcataggccgctcctgccttggagaatctgcaattgcaagatgccacgagaagcaattttgtttgcctcttattctgttttacagtagcagcccatcagagacccc

SEQ ID NO: 53865 - DNA, 430 bp, Mus musculus
  source 1..430: mol_type = other DNA
tgccagaagtcagcttctgtgaacctggaggctgtttatttacagcgaactcagcaaactcagcttctctgggtcctggagccagtgaatctccaggggggtgcccgctccagcactggtccctgagtccggagggcgcctccctggggtcccaattcctaaaactgcactaagtctcttttgggggaatccctcaggaaacccaggagaggacttcttgggtgtccctaggtgcctttgcagacatcagccatcgccccctggaggggagcctggcattccagcaacttctgtgactggagccgatagggaccggcctctctcgggcggggggactccaacaagcggctggcagagcggacctgtttgcagacaaaactgtctggttttgtaacaatttccccgctgccggccaatttttatataacgc

SEQ ID NO: 53866 - DNA, 451 bp, Mus musculus
  source 1..451: mol_type = other DNA
tcccgtgcagcctgtttgcacaccagaagcctgggaatctaaaaagataaaatctaggatccttccaaactccagcgtttatcaaggacacttcaaatagaagaatgctttgaacattattctggtatttctatagaaaaaaaaggctcaacaacaaagcataattgatgatctggcgatctgagctccagattttatagaattgacaggcctgttacctgactggtgggtgttagtcccacagcttttgggcaagaattggagagacctcattttaactgacgtcatttgccgcgaggagcgggccctaaagtcaaggcttccccacagggtcagcgggaccgaggccgaaccaggcccagcttgcccgagccagcccgagcagggcggggcgcttaggtggccgcgaagggcgggggcttataggctccgcccccggagccccgcccct

SEQ ID NO: 53867 - DNA, 457 bp, Mus musculus
  source 1..457: mol_type = other DNA
ttacttaatatcccaagattttaactttctgtttatacaaaccaaaggacccaattggctcagggcgtttaactaaaattctatatctcaaataaaaaaaaagcccctctagtctagcattaaattatattgggtatatactgccaggatagcttctaatcatatattttaataaatcttgtaattgtttcatagtttaattgattattagtatgtatacaaatggatgggtagttcatttatgcatgtaattaactttagtaagtctagcctcaagctttggattttcaggcaggtgttaccacacctggcatgtgttcctattgtgatgaacagatcagtatacttaaatgtgcaatttcaggccatttctaatgggaaaaacggacagccttttatagctactgttttgaaaaggagcaagatgtattattatatttttggcatgaatttatca

SEQ ID NO: 53868 - DNA, 207 bp, Mus musculus
  source 1..207: mol_type = other DNA
ttgtgagacggggtctctcactgaaccattgcctagctagcctggctgaccagcaaggtccagtcccattccctttgcaatgggaattgcaaactcacagggtttctctgtgccaggctggccttgactctctctctctctctctctgtgtgtgtgtgtgtgtgcccgccctgttggttctgccggcaacgaggggagtcaattggt

SEQ ID NO: 53869 - DNA, 525 bp, Mus musculus
  source 1..525: mol_type = other DNA
caattaaaatgattagtctgtcctttggactttccaaggccaattccctgaaagatctttgttaagctatttgcaaaccagtctggggtatgctgccaggatcgcaccctgctggtaggtacctcatggggtatgctgaagttcacagaaaatgaatttcatgtataatgtgatgttttaaaaactcaaaaccaatgcaaaaatccttggattgttaatgttaagaacttgacagacagggatcccatcctgtactagtatgaccttgtcatgtacctcactgtaattccagtcctggttctacaattaattttcgttacaaaaatgtgaatgaaatcgattaacataccattagatatttatctcgattactctggcctgatcaggtgccaagggcaagcgaggctgacagggcgacctcccaggctcctcccgcgtgtcccgagccactcagcagctctgccattccgcgcgccagtactgggcgcccgccttggcccgccccttacgccggcagccgctgcc

SEQ ID NO: 53870 - DNA, 334 bp, Mus musculus
  source 1..334: mol_type = other DNA
aattatcattgttgagccctttaaaaaaaacagaaataaaattggaaagttgttaatatttttaaatccttcttagataatcactgaatgtatgtactactgccactatgcacccttattaggtctaacattgacctacaacactcaggcttgagcctattcatttcatctttataaattaaattttcatttattaaattttcatttaatcctcaaagccttctactatctgcactctggatttaaaataaaagatgaggcgctgctcgggtgtgagcctatctcccaagtccgccccacgccgggcggggcctggccggactgctctaactgc

SEQ ID NO: 53871 - DNA, 358 bp, Mus musculus
  source 1..358: mol_type = other DNA
taaagtaaagatatataaaccttaaaataaatactggcagacgtataaaaaaaaaaaaaaaagcttctacttcattaggttctgaatcgtaaaaccaaaatatttaccagtatatctaagatctaggttatattataatgtatagtcagtcctttattatgtcgagttttacatatactcataaatattcatgaacaatgcttgttttgaggtccactaagtggcggaggggggcgcgcgctccggaggcgccaacaatattgacgactgtatagaaataaaagtattcaaagctgtctcagctgactgagcttctgtccccgcctctccctgcaatttagcgggatgggacgacacg

SEQ ID NO: 53872 - DNA, 319 bp, Mus musculus
  source 1..319: mol_type = other DNA
aagagtctcaggactttctgccagtcaggcccatcgcgcgagatttcgcgcggggcggctcatgcgctgtggcctcacaacctcagggtggcacgcggtgtgggtggggcccaagtccgctgcctccccatatataaggaagccccacattagttggagccgtgcggctggcgtggcgacaacgaccctcgcttgcccccggccagttggtaggcatcgtccccgggggccgtccccacttgctggggggcgacttcctgtcgccgccgccgctgccccccctcccgccgccgccgctgccgcccctcccgccgccccc

SEQ ID NO: 53873 - DNA, 426 bp, Mus musculus
  source 1..426: mol_type = other DNA
agatgactcaagagctatttatttatttatttatttatttatattactaataattcattctttgtcaaaacagaagtccagcctctgggattcacagtgagtctgagttagcctgtgttacattagatactttcaaaatcatgctcaacgacacagtgagttcgaggttctctgcctataggagactctgtgcaggggttcctcttcaagtcagcaagtggggcccgcgctgctccctgttaaatcaccgggactccagggaacttggccacctcctcccttaggtccagggccagggctctcaggtgggacgtgattgacaggtcaactttggctctccccgccccgtggccgccttggtacggtccgccgggcgtaaggcgttccccgcacccccccgcgcggttcggcccccgtctactctgg

SEQ ID NO: 53874 - DNA, 393 bp, Mus musculus
  source 1..393: mol_type = other DNA
gcttctaacctaaaaggtgatccctgttcgccctgttcatactgagaggagggaccagagtgggagagctgggctcctactgcacctcaggcccagctcagttgtggggctgcactgcagctccccagtatgtggtggcgctgcaggtgctgcaacccctgtcctgcccccaggcacccagggttctcagttgcacccttccagcctcaggtctggggggggggggcggaggacgtggtcaccgaggggagcccccgcccccttcacagaggccgagactcgggctaggggaaggcagcgcggccaatccgtcccctccccacacctactctgagggggtgggtgatagaggtggagcagcggtgagggggcccctccctggcacctccctcc

SEQ ID NO: 53875 - DNA, 233 bp, Mus musculus
  source 1..233: mol_type = other DNA
ctgtcccaggtcaggcttctaacctaaaaggtgatccctgttcgccctgttcatactgagaggagggaccagagtgggagagctgggctcctactgcacctcaggcccagctcagttgtggggctgcactgcagctccccagtatgtggtggcgctgcaggtgctgcaacccctgtcctgcccccaggcacccagggttctcagttgcacccttccagcctcaggtctggggg

SEQ ID NO: 53876 - DNA, 369 bp, Mus musculus
  source 1..369: mol_type = other DNA
atagtctttttctaaaaacgtttactaacatcagcaagtttcttaaggaaatagggtccgactcacctgcagatatctgcggttgtgctctagcaggaatccccgacagcgctcctgcgtctgctgctgctgctgctgctgtgcagaagtgagtcagaggggctaggctgcctccctgaagccttagggatcgcccctgatgctccaagatcgcgctcctctgggacctcttcaccccagcagctgcagggatgctgagcaggtgcgggaagccgggctactgctcaccgggtcgcgtcctgaggtcgccgcgctcctggtggacgcctggccggtgcaggggacgcaactggacggcccagccctcca

SEQ ID NO: 53877 - DNA, 357 bp, Mus musculus
  source 1..357: mol_type = other DNA
ggagacagagtttctctgtgtatctggaggtctaaactcttcttaagatttacatatttattttatttatatgagcacactgtagttattcactacagatggttgtgaaccaccatgtggttgctggacgtgtacctgtaaatcataagtgtaggtgcccctcccctagagctggagggttattctctataatagtgaagttagtcattaaataagccccgcccctctcgcagaagcggggggagttgcagctacttggtaaaggccacctaccatggccaccaaggctgtggccccccacggccccatgggagcgcaggggtggagctagggaggacgctgcgagtcatccatccc

SEQ ID NO: 53878 - DNA, 478 bp, Mus musculus
  source 1..478: mol_type = other DNA
tgaaaacaaatgtaatacattttggttataattcattgaaattagtatctgtaaatcctaatgcctctgaaagtatacttcagttttaaatagcactatctagcactaataaaccttgtgggtattttttatctgaaaaagaaaagcactaaacttttaagattaagggatcggcaggtggatttctgaggtctagaccagcctagtctacagagtgggaaaagattaagggatcatatatacttaagatgtttatggtatttttatctgaaaaagaatcactaaatttttaagatcaaatgatcacatatactaaaaatctggatgattcccacattgcgggccccgagggaatcccgagtgaaaccgagggccttaaactctcgcgagatctccgggagcccaatggaacgcagggctctgcttatcactagggctatttgttaggggcggagctcctgaggtctctcccggagag

SEQ ID NO: 53879 - DNA, 314 bp, Mus musculus
  source 1..314: mol_type = other DNA
tgtggaccaggctggccttctggtgaaaacattacaacagctatagttacaggtacatgtaatgaacacaattacatttcaatttcaaaaaaattaaaaacaaaattaatatttgaatgctcttttgcctaaaaatacttaatacatacaactattaatcgtctacctaatcggagtatacacaacaatgatcttagattaaagcttaaccctaatcatgatcttttgtttgcttgggattaaaaaaaaaagagtggtgcggtttaggtttcagaaacctcactaggaaccccttcctgtgcggcaaggactct

SEQ ID NO: 53880 - DNA, 309 bp, Mus musculus
  source 1..309: mol_type = other DNA
ctgtatttgtcaggcactgacagagcctcttaggagagtataacaggtttggctctataaaaagactttgtctaaagccatgctcatctgtattttgtagacaagaaatggagacaactgtctctgagtctgctcagatgatgacatgaaccaatgaaagtaatagttaccttaggacactattgcaaggtggagacagctcgatgcagtgacttgtacagcatgcaaatgctctcctcccggcacagctgggcctgcatcgcctcctgggaagaagctaggcttaaactgccatcgttgctgtggcag

SEQ ID NO: 53881 - DNA, 369 bp, Mus musculus
  source 1..369: mol_type = other DNA
agcattgcccatggatgtgctcaaagatggactgtgcatctcgatcccctcgggccccacgggttttgcgacgccagagctgccttcatcactgctgctgcagctgtccccggagcctgcatcacagagccggcgctttcggcggcccgccgctcctttccgcccgggtagaattcccgggagaagctccgccatttaagttctgaaactgccgcgacgtccgggaccgcttcgcgtcgtcacactccgtggtggtctctgatgcagcggaaatcctgtccgggaacgcttgctgtttgggcccccacagccaccgtcgcttcctcctccggagccgtacggggcaccgcccctcccgcgtgctgccgg

SEQ ID NO: 53882 - DNA, 267 bp, Mus musculus
  source 1..267: mol_type = other DNA
tgatggcgacttctcagccttctcggggaggggaccaacaccaggtcgttccaagagacccggggacctctcttgatctccgcgcattaagaggaggatcccccttagatggcttcttcttcacagagacccgcggccgagtcggccgccttggatgtacgcagtggacaccccggggatgaccaagcacacccccaggcacctctcttccggcagcacgcgggaggggcggtgccccgtacggctccggaggaggaagcgacggtg

SEQ ID NO: 53883 - DNA, 149 bp, Mus musculus
  source 1..149: mol_type = other DNA
catttatttaatgtaagagggcatcagttccccctatagatggttatgagccaccatggagcttggagaaactcgatcttccagttctacatgcgcatgcacacgcgcaccttgaaggctaatcacaaactttatgtgtcgctagcctg

SEQ ID NO: 53884 - DNA, 289 bp, Mus musculus
  source 1..289: mol_type = other DNA
ctggagatggcctagttcctaggggctattcctagtctctgaggacagtatctggatagagactggcgccagtccttcacagttttaaccagtctgtcagctttctgtgaacactcaaaggaagagacttttctgaaaagatattctaaaaacacttgagtatcatctccagagctttttggcaaagcaatgatatcctgctccttgcagcacaaacctgttttgttttgcacctgaggctcaacccatagctgcaggagatcagaggtcaggatagctcacctatgat

SEQ ID NO: 53885 - DNA, 277 bp, Mus musculus
  source 1..277: mol_type = other DNA
tagttcctaggggctattcctagtctctgaggacagtatctggatagagactggcgccagtccttcacagttttaaccagtctgtcagctttctgtgaacactcaaaggaagagacttttctgaaaagatattctaaaaacacttgagtatcatctccagagctttttggcaaagcaatgatatcctgctccttgcagcacaaacctgttttgttttgcacctgaggctcaacccatagctgcaggagatcagaggtcaggatagctcacctatgat

SEQ ID NO: 53886 - DNA, 335 bp, Mus musculus
  source 1..335: mol_type = other DNA
ctggagatggcctagttcctaggggctattcctagtctctgaggacagtatctggatagagactggcgccagtccttcacagttttaaccagtctgtcgagctttctgtgaacactcaaaggaagagacggttttctgaaaatcaccaagagatattctaaaaacacttgtgtattgtctccagagcttttcttctatacgacataccagctcaagtaccatgctccctgcaatgatatcctgctccttgcagcacaaacctgttctgttttgcacctgaggctcaacccatagctgcaggagatcaaaggaggtcaggatagctcacctatgat

SEQ ID NO: 53887 - DNA, 284 bp, Mus musculus
  source 1..284: mol_type = other DNA
ctggagatggcctagttcctaggggctattcctagtctctgaggacagtatctggatagagactggcgccagtccttcacagttttaaccagtctgtcgagctttctgtgaacactcaaaggaagagacttttctgaaaaacaagaggtattctaaaaacacttgtgtattgtctccagagcttgcaatgatatcctgctccttgcagcatgttttgtttcgcacctgatgctcaacccatagctgcaggagatcaaaggaggtcaggatagctcacctatgat

SEQ ID NO: 53888 - DNA, 308 bp, Mus musculus
  source 1..308: mol_type = other DNA
atttgcaatatatatatatacatatactcacacattctcacggcttttacaagcacttatcaaagcctgagagtatcctctgctctctctgctgagccagcagggcctgcaattctgcccaagctcccgtaaaggccgtcctggaagcaggatatatatccggtctcagccatggatcagggatgcaatgtcggtattgtccacacatttccgcaaggcctccggaggtacagcatctcttccttaggaagttaattaaacaattgcagcgtggacttcagtcgcataattggatatatgctaatatt

SEQ ID NO: 53889 - DNA, 303 bp, Mus musculus
  source 1..303: mol_type = other DNA
ctggagatggcctagttcctaggggctattcctagtctctgaggacagtatctggatagagactggcgccagtccttcacagttttaaccagtctgtcgagctttctgtgaacactcaaaggaagagacctggtggatcaccttttctgaaaagatattctaaaaacacttgagtatcatctccagagctttttggcaaagcaatgatatcctgctccttgcagcacaaacctgttttgttttgcacctgaggctcaacccatagctgcaggagatcagaggtcaggatagctcacctatgat

SEQ ID NO: 53890 - DNA, 260 bp, Mus musculus
  source 1..260: mol_type = other DNA
gacagtatctggatagagactggcgccagtccttcacagttttaaccagtctgtcgagctttctgtgaacactcaaaggaagagacctggtggatcaccttttctgaaaagatattctaaaaacacttgagtatcatctccagagctttttggcaaagcaatgatatcctgctccttgcagcacaaacctgttttgttttgcacctgaggctcaacccatagctgcaggagatcagaggtcaggatagctcacctatgat

SEQ ID NO: 53891 - DNA, 211 bp, Mus musculus
  source 1..211: mol_type = other DNA
cagcagttagtgcttagacctagaattcaaatatatgtgtttataggcatttctgtgatgtagctctacaaacattttcctcaagggctccagagttactgggagatagctgagatgcagcttcaaaggttatttctggcacctcagggtgagcacctaatggtcctactggatacatagtaatgtggaaccggctggaagaatctcttcc

SEQ ID NO: 53892 - DNA, 215 bp, Mus musculus
  source 1..215: mol_type = other DNA
taggggctattcctagtctctggacagtatctggatagagactggcgccttactagtttcagagctttctgtgaacactcaaaggaagagacttttctgaaaaaagtattctaaaaacacttgtgtatcatttttctgcaatgatatcctgctccttgcagcacaaacctgttctgttttgcacctgaggctcaacccatagctgcaggagatca

SEQ ID NO: 53893 - DNA, 240 bp, Mus musculus
  source 1..240: mol_type = other DNA
ctggagatggcctagttcctaggggctattcctagtctctgaggacagtatctggatagagtccttcacagttttaaccagtctgtcagctttctgtgaacactcaaaggaagagacttttctgaaaaaagaggtattataaaaacacttgtgtatcgtctgcaatgatatcctgctccttgcagcacaaacctgttctgttttgcacctgaggctcaacccatagctgcaggagatcaa

SEQ ID NO: 53894 - DNA, 337 bp, Mus musculus
  source 1..337: mol_type = other DNA
attgagtgcactcggtaaactgaagaaggagcaagcaaccttcttcagtctcagcctgtggtttcagaaagagcctcagctgggctgctctgcattcccaggacacttaggagcacccgtaatttcctatagcttcttatagttactttcaagaaagaaaatctattaattctgctcctaatgcatttgtcagactccaacataggaaagtgtgcactttctcattgtctatgggcagagatccaaagcacatatttaaaattaagatttgtacctacgagtttcgtgggaaattgcattggttcttgatttgtcagtaaagaagctatgggccaat

SEQ ID NO: 53895 - DNA, 389 bp, Mus musculus
  source 1..389: mol_type = other DNA
atttttaaatttgctgtgagacaacagctttggagccagtggccaaggtggatcttggatggccacgaatgtccttgggacaccccgggtccttctccatgatattaaacttgtggatgagacacagtctctcaggaggatgtcgccctgaattggtaccactttattaacgggtatgcctttgccatttgctttgaaggcaatttgcataatttaataaaattattcaacagggctcaaaggcctgctgagcgttgctgcattccttttgaaaaggactctgctctttggactgaactgcttctgcctgtgcgcctcagggaagaagcccacagccgcagaagtcaggacagaccgcctctccggacagaccataatttgggatatat

SEQ ID NO: 53896 - DNA, 424 bp, Mus musculus
  source 1..424: mol_type = other DNA
gatagagctcaatgacatttttaaatttgaccttcacggctgtgagacaacagctttggagccagtggccaaggtggatcttggaaggccacgaatgtccttgggacaccccgggacagattaaacctcaggaggatgtcaccctggcagtttaccactttattaactggtatgcctttgccatttgctttgaagggaatttgcataatttaataaaattattcagcagggctcaaaggcctgctgagcggaataccggtgccccccaagggatacaggtgtcccccagttgctgcattccttttgaaaaggactctgctctttggactgaactgcttctgcctgtgcgcctcagggaagaagcccacagccgcagaagtcaggacagaccgcctctccggacagaccataatttgggatatat

SEQ ID NO: 53897 - DNA, 472 bp, Mus musculus
  source 1..472: mol_type = other DNA
tcattgtcaacactgatgtgggccagagtgggctttctcggatttcagaagagggactgaccctcttttgagttaaatcacagacaaaaatcacagagtccaggttttattatattatattattattatattatattatattatatttattatattatttattatattggccttcttgagaactatgacaataccttttcctgaaaaaagacattctctcttgtccttgaaacaaagttaataatgtgcactcagcagatctttgagttcaaggccagcctgcttgataatatctgtgtgctattctggatcagtaaagtaaaactgtccttgtaaaactatcctgaaagttcatttcttgccatgaattcttcaatggaaaattgatggaaagattgacaggtgacaattctaaacttattctctagtctgatctcacaataggaggtggtctgactaccagctcagtctg

SEQ ID NO: 53898 - DNA, 279 bp, Mus musculus
  source 1..279: mol_type = other DNA
taaagattttatctattttatgtaagtacacttcagacatgcagagccaccatgcagccagtgctcttctcttgaagtttaaacctaccttggcacttttgtctgtgacattctagacaggggagacattctcactgtcagtggatcttactaaggaagatcctttctcactgtgcttttagtgtctttaaaagacatagggagcgcggggagacgcctgaattcaggtaggcctcctttctggatccgtgggatggattcgcctcttcactagccaca

SEQ ID NO: 53899 - DNA, 438 bp, Mus musculus
  source 1..438: mol_type = other DNA
gaacgcgtccgacttccttgatattagcttgaagtaaaccaggtacatgcagcttggatgctagctgtgtgggtcacagcccctttacacctgcagatcagataattacataatgatttgtaatagtagccaaattacagttatgaagattaaagcgtcacagctttaggaaggttgaaaaccttatagaaggctgctctctgtaacttggccagtgtttactgtgtccaacaaagtagctgtaagcctgggtgagtacgccctgaccccagcaccaagttgtgttatatcccaaatgtgtcaggaacatgtgtttaacaacaattgtggcctactatgctatattactaggtatccgaaagttataatgctatattaacttccaagtattttttaaaacggatgtttcatagcagtttcatcctggattgaaacctt

SEQ ID NO: 53900 - DNA, 488 bp, Mus musculus
  source 1..488: mol_type = other DNA
gtaattgaggaaaatacataataaaaaatattttaaaaaataatgataaacaatacaaatattattgcctttatacttttaaaatacttttatagagagcctggagtatatttgctgcagatcaaatgtgatctctatgttaatagatatgcagttaacaagatattgcatgcaccatttaattaacaagagttatcagaacacaggtttcttcttaaaagtagacagtgttcctacaatttgaattagtatgagttaaattttagtatgcagattgtattcaaggtggcttgttatccaagcaacaaatttatacaacctctgaacatttttaagccctcgggacttaaggagctctaagagccgaaggcgggcttcgcgctcttccggacaaccccgggctgctctcggaagaggaaggcgaggaagccacgcctcccacgctgcgccctctgtcggcggagcccggcgcccgagccgcgtccgtg

SEQ ID NO: 53901 - DNA, 262 bp, Mus musculus
  source 1..262: mol_type = other DNA
tgatatcatttgcatctcacctctagtagctgaacaactgatactcagtttcttctaaaatctaactgtataattttatacagttctagactaaagagtgcgcatttgagaaggccccttggcctcaggctgaagcctcgcagctttggccccaaggggcgaaacggtctccctgtctggcaggctgggaggtcttgcgcaagcgcacgctgctgcatggacgccaatgctgctgcctcccggagcagagggagacttgggc

SEQ ID NO: 53902 - DNA, 278 bp, Mus musculus
  source 1..278: mol_type = other DNA
ttccaagaaccttagtttctgcaattttctcagccaggagttatatatgtctgggaaactgacactgcaaagttctgccttgttccctgcccttaagggataaatataggcctagaaaaaaggcgtctttttatccaagaccctctttgggataaggactttgcatctaaaattaaaaagcataccctttgtgcgtgcacgcgtgtgcacgcgcacccacacacactgataaccaattctcaattgagaagaatatgacttttcctttgattccaggc

SEQ ID NO: 53903 - DNA, 356 bp, Mus musculus
  source 1..356: mol_type = other DNA
tcaaacaaacagtaagcttgcatttgtttcagagtctctaactgttcacttggcaagcgtacagaatacgggttatatgaactcattagagaacattaactgtatttgtattccagatagaaaaatatctgggagtaactttgaacttcaagagcatggtctgatctggtcgttaatgactctactatacttgaataatcgtgtattattttttacatatattttcatatataaatttacatacatatatatcttgagaggcctagttttgttgccagaaaaaatgatgctgtttgttctcaaggacctaggccagggcgtggccacgccgccctcctgcccggtcttatgactcc

SEQ ID NO: 53904 - DNA, 341 bp, Mus musculus
  source 1..341: mol_type = other DNA
gaaagtacctttactctgcactgagtaaaaaactttcctcctctagcagggggcatgcttaagttcccccccacctcaagtccggcggacccgggggcttcaggatctgggggcacttccggtaagagcgatgtggcgcgaagctccccgcgggacccttaaggatcgggtggccgagcagggaaggggtgcgggaaccggaccccgagtgagctgcccggagtgagcgttccgggcgcttccagccgccccacggtgagtcggcgcccccgcctcccaggccgctcgggccccccactccgcgagggtgacgccgcctctccacgggcgccgcgtgaccg

SEQ ID NO: 53905 - DNA, 397 bp, Mus musculus
  source 1..397: mol_type = other DNA
atagaaaccaatcgacttcttttgtttacttgacacagaatctcgtgactttctctctcactttaaaaaatatatatggaaatattttacatgctccactagtagatggaagtctgagacagactctctgtaaggagtctgattctagtctcctctagcctagtgttgtgtcaatagacctagtagggagtgaaaacttttattactcttccaatggtaacagaggccactcatctgtcagtttaggaactttgtgaaattacagaacaggagagattttgggaaatatatccaattatcacattgtggtagtatatactctagtcacaaggtgacccctttgttgttcagcaatgtgctgctgtaggacgatctgctgtcaattatctgaaaggcg

SEQ ID NO: 53906 - DNA, 475 bp, Mus musculus
  source 1..475: mol_type = other DNA
ccttcaagaggaaattacatttttgtttgtgttcaagaaatcaattttatttgttttgcagttgttccggaactagttctgtagaccgtattaaaagcttgtgccaagatgtcctgttacattcctgatttatagttcagtttttaactatcagagtgaagatttcagcacttcactgtccaatgatttaaaaaaaaggttgttcaattaaattcagaaaaacaagtagttcttatgaagtatacttgcaccaaaaggtgttcaccttatttgaaattcaaatttgactaggtatcttgtaattttattaactttgacattaatttaacatgaagctatgaggctcgcctaggctcaagcagcttgatctgttgcttcagataggaagcaaaacctattatccttacaaactatttagcatagtgtccagcaaccagaaagaattgcttgatcacttcttgccgtaaagcggata

SEQ ID NO: 53907 - DNA, 245 bp, Mus musculus
  source 1..245: mol_type = other DNA
tctacagaataataatttctgttaataataataataataatgtgagttccaattgcatcttctaggctatgtggcttcgaaaccaatttcaatgacttttaccttcttgtcaccatagtccgcactccggcagtttccacgcccgtaggcagaccgaggaagggagcgtgggcgggccttaaaacacgcacgcccctcggggcatcccatcggggcgggccctttccgagtctcacggagcccgc

SEQ ID NO: 53908 - DNA, 405 bp, Mus musculus
  source 1..405: mol_type = other DNA
agtaattttgttttgtacatttttttactgaatataaaagcagaaaattaaaattataaatcataagtatgagacagtttatcggcatctttctctgaattctccagaaataatcacatcatgacaactgggaaggccagaattcctgtcagctttcaagctccggagacttgcagtattcaatagtacataagccaggttgaaaatatattatttcctattattagaattcaaatgtatttaaaatgtcattatattgtgctaactttatgacaaataaaatccagccccgaattttctttataaaattcagacaacatattttggacaccttttgaaaagctatgacttattttagtacagtggcgcattgtaattcatttaagtcgtccatgacattgatgg

SEQ ID NO: 53909 - DNA, 359 bp, Mus musculus
  source 1..359: mol_type = other DNA
atgttatgaggctcccaacacatatgtctcggttcagtcagaaaagatgcatctaaccctgaagagactggaggttccagaatctggagtgaactgtaaaacaaagtttaacatatatgtgaaagctcacagatgtatataactccagttctatgggattcacagatctctgaataaataggtcatagacattcatacatacattaaagtagacaaattctgttctttttcccttaaaaatacactccttggtgatttccatgaccagtgaaagatttaaacatgacttatgtacttgaagtgcttcaatcataggttatgcaattttgtagggagaactttgttgacaaaacaaagct

SEQ ID NO: 53910 - DNA, 289 bp, Mus musculus
  source 1..289: mol_type = other DNA
gctgagtatcagttcagtcctggactgtaaaacaaagtttaacatacatgtgaaagctcacaggtgtttataacttcagttctgtgggacggatctctgaataaataggtcatagacattcatacatacataaagtaggacaaattctgttgatgtgtcctcaaaaccactcagcagtgttctttttcccaaaaattactataagaatcatgacttatgtacttgaagtgcttcaatcataggttagtagggagaactttgttgaccaaacaaagctgagggtggtcca

SEQ ID NO: 53911 - DNA, 237 bp, Mus musculus
  source 1..237: mol_type = other DNA
aaggaggctactcctcactaagacctagggtgaactgtaggagttcctctcctcttagctaggagacacaaggggcacttcagcacttgggtagggggagggacacacctcccagtgctgcatagctgagctgagcatgcgcagcatcttagggcttttctgagtctcttcacaaagtgcagacttttaaaaacaggaaactctttgcagtccagagctgcagtttgcagtggagca

SEQ ID NO: 53912 - DNA, 309 bp, Mus musculus
  source 1..309: mol_type = other DNA
ggaaatatctgtggaaccctagccctggctgtcctggaactcaagctgtagaccaagctggcccggaaccactgaaggtatagctctaaccctggtggaatttattttcaccaacacagggagatatcttccatattttcctacagtaacgttttctctttgtaataagaaatattttttgtagagagattataacaccttaaacactccctagtttgacagagattaaaggccacagcggcctggcgtttttgtaggggtgagagctgtggcacccgccacctctttgtcggcctggcccaggccgcg

SEQ ID NO: 53913 - DNA, 116 bp, Mus musculus
  source 1..116: mol_type = other DNA
atagctgagctgagcatgcgcagcatcttagggcttttctgagtctcttcacaaagtgcagacttttaaaaacaggaaactctttgcagtccagagctgcagtttgcagtggagca

SEQ ID NO: 53914 - DNA, 320 bp, Mus musculus
  source 1..320: mol_type = other DNA
tactgagcctcattcccagccttggaattaccttcattgtaaccccaggggttagtggtgctgggagagatcatacagtaagacaatgtaataatttttaaaaaagattgcattagaaggaataagttgaagaaccaaatacatttctttgtcttctcttaacctaagtataggtttatctgacaaccctacaagcatatagcatgaattatttccatggttttcaaaataacattgaggaatatgttatatacctagcagagtccctggtatcctgtgagagctcaatgtcctcaccctagagtccaggtaaaagctgg

SEQ ID NO: 53915 - DNA, 411 bp, Mus musculus
  source 1..411: mol_type = other DNA
aattatttccatggttttcaaaataacattgaggaatatgttatatacctagcagagtccctggtatcctgtgagagctcaatgtcctcaccctagagtccaggtaaaagctggcagccgccggctctgggaggcggcgggaccttggcggtcccccgagcgggcgcgacgctaatcgagggccgctcggccagagtctgccgggcgggagcggagctcccggaggccagtggctgggcgagcccgggaagctggcgggctgcatgggactgtcctgcctgggaaggccgaggaggaaggaagggagggagacagacatagtgacttccgtttccttctcctaggccggggcccgccgcccagcctgatccgggctcgggccgcccctcctccgggaccctcccctcggga

SEQ ID NO: 53916 - DNA, 348 bp, Mus musculus
  source 1..348: mol_type = other DNA
tgaatttcatttcattgtatatatttaataaaacttattattattattggcatttttaggtgaggctgaccttaagctcacagagagcatttaatttaatttttatttatttatttatttattttttgatttatttaattttaaacttactcaaagcatagataaatagcaacatattgacactgaactgacctcagaactggatctcatgagttttaggtcagcctggtctacgctatctaacataacaccttttctcaaaaagacattggctgtcatagtatatgtagttcttggtaataagaataattgttaacccaggattcatcagttaagagcacttgctgc

SEQ ID NO: 53917 - DNA, 482 bp, Mus musculus
  source 1..482: mol_type = other DNA
gtttggaggggcacccggagggcgcgcggcccaccgtgaggtgtcgtgcggccggccgggagggagccgagaaggccgggcgctccggggccgggccgcggcctcgtagggggccccgcgcggggcagcgagcgagcgagtggccgtgtccgggcggggagcgagccagcgtcgccccggccccgcgtcaccccctgtccctcgcccaagtctcccccggggacctcggcggagggggctcccccccccacgggtggcccaacgcgcagcggcgcaagatggaggctcggcgcctccgcgtagcctgctcgctcgcttcctctcctcccggggcctcttaagcagcccgtggagggggacgagagccccccagactggaggtggggtgggggtgccatccctggccgggattccccggggaggccacggcccggtggcgtgtggtccgagggaggcgagggaaaatctactctgctcacacc

SEQ ID NO: 53918 - DNA, 436 bp, Mus musculus
  source 1..436: mol_type = other DNA
tccctcgcccaagtctcccccggggacctcggcggagggggctcccccccccacgggtggcccaacgcgcagcggcgcaagatggaggctcggcgcctccgcgtagcctgctcgctcgcttcctctcctcccggggcctcttaagcagcccgtggagggggacgagagccccccagactggaggtggggtgggggtgccatccctggccgggattccccggggaggccacggcccggtggcgtgtggtccgagggaggcgagggaaaatctactctgctcacaccctcccttcctagagagggaacccgccccatcatctccagcgcgtggtgggggaactgcttgggcaaagcggttggcatcgatctcggcgtcggtccccagcgcgtagagcttgccccgaagggggccctgcctgcctggcatgggcggagg

SEQ ID NO: 53919 - DNA, 414 bp, Mus musculus
  source 1..414: mol_type = other DNA
agcacactaattggtcgtctactacaactggatgtgtttaggaattacacgtatatacatatatgcatgcaataatacaataatacaatagcaatgttgttgtgtgattatattgtgattttaataataataaaaacaaagaagtaccaacaaaagaatttagtcttcttaagctccttagctataatatgatgacaatttttttcatagttttggattttggacaaaacattaaggtaaaaatacttgttttggcctaagtctgcgctcgttaagacaagtcattgtcaatggcttcgaagtgtgcaagctctgtttgcgttgctggcacagctcaaatactgcaagtgttccaaacctttgttggagaatagatgatcaaacccatgacaagtttgaagctgttaaactgct

SEQ ID NO: 53920 - DNA, 415 bp, Mus musculus
  source 1..415: mol_type = other DNA
aactggatgtgtttaggaattacacgtatatacatatatgcatgcaataatacaataatacaatagcaatgttgttgtgtgattatattgtgattttaataataataaaaacaaagaagtaccaacaaaagaatttagtcttcttaagctccttagctataatatgatgacaatttttttcatagttttggattttggacaaaacattaaggtaaaaatacttgttttggcctaagtctgcgctcgttaagacaagtcattgtcaatggcttcgaagtgtgcaagctctgtttgcgttgctggcacagctcaaatactgcaagtgttccaaacctttgttggagaatagatgatcaaacccatgacaagtttgaagctgttaaactgctgagccaggtagacaacatcctgttgt

SEQ ID NO: 53921 - DNA, 334 bp, Mus musculus
  source 1..334: mol_type = other DNA
acttttggaagcctcacaaaaattttgggagtctcagaaatgcttgacatcaaatattcttcactttagctgcaaatgttgcatcatcagccaatgaaatggcgttgttcattaccacttcctttaaaagtcgttaactttcattgggagtttactattagatctctgagaaatcacctgttctcctctcccaatttttggggagagagagagagagaagagagagatcaaatccaatttatctccatgaattagaaggcatgaaattctaccttgattttcagccaagaccattctatgcactagcatatggtctccagaaagaccttcttct

SEQ ID NO: 53922 - DNA, 220 bp, Mus musculus
  source 1..220: mol_type = other DNA
tctctctctctctctctctctcacacacacacacacacacgttttccctcctaaagttaaactggcaagagacttattctttcttaagttggtcctgaagcacacattgaaggaaacactgtctgattctgagattatgataaggtcatgtgagatcagaaaacatcctagtgtggtatgaaatctaaatttccggggctcagctgcgggcatgctcaaa

SEQ ID NO: 53923 - DNA, 210 bp, Mus musculus
  source 1..210: mol_type = other DNA
tttgccatctgacagcagatatcttggctttaatataaagagctctacagaagtcctggtcttcacttcatgaattcatctcaggcttctgaggtccctgaggagttagtatataataatgcaaagtttagtcgctcaggagcttctttcttagtcgaagtgacttgtgttagctactgagctaactggagctcagccctctaggaatct

SEQ ID NO: 53924 - DNA, 273 bp, Mus musculus
  source 1..273: mol_type = other DNA
aacaaaaatacaacaaaaagtttcattgcttttagaaaattctctttatctcccaaggactcagagggctctgtctaaggtcatacattctcttcaaatgattctgttgcaacagcagaatgactgttcaaaagaaaattgttattttcaaacaatttaattttctgccaagttatcttagtgaagagtcttcctgagttacaacaagcaaacttttgttttcttccccgagaataatgaaaacatgagatcactactcttgccatgatcttc

SEQ ID NO: 53925 - DNA, 535 bp, Mus musculus
  source 1..535: mol_type = other DNA
attaaaaattattgtaatcttatgacctctgtattttcacagcaattattccataggaaagtatgatttctgttggaaggatcaaaactgctacctgcaaaagagtttgaaggcaaaatgtggtcaaaactgtgatacacatataaactataatctagtatgaagcaaaggactatagtacacaaaagcaaagtccacaataattatcatggaagattttcataatgcttttttgtttcatggtcaaaagttgacagtttagctcactaatccctattcttcacaatattaatatgactttccaagcaaggtactcatattgcataataagcattgagtattatacaaagtaataataataaataaaatatgtgtctacacatcatgtgatatttgaacactctcttttataaagaatgtccagaaataactttggacaaaagataatcatgcctatatgacttttaaaccctgtttgaaatattttctcattccaactagtctgtagcagagttgatttaggtttattcttcaa

SEQ ID NO: 53926 - DNA, 261 bp, Mus musculus
  source 1..261: mol_type = other DNA
gtagtctcataggcaatggcccaagcttctgaccttaataaagctcttaaaccattaaagctcttaaaccttagagagtctgtgcactgggacctggggcctagtggaaaagcacctggctgacaggaactctggacagacatggcatgccccctggtataactttagtttattctaaagctaagaccctcatttgagatcataggctacttacaagctgtgatgttgcagctgttgccatggctacattatgacatagga

SEQ ID NO: 53927 - DNA, 331 bp, Mus musculus
  source 1..331: mol_type = other DNA
gatgtgtcagcccttaagagcactgactgctcttctgaccatctgtaatgagatctgatgccctcttcttgggtgtctgaacaaagcaggctacagtgtatttacatataataaataaatagatcttaagctttaatgagcctgtgtgagtcattttggcttcataaccttcaaaaccttaaggatttgggggtgggagctataggcccaagcatcttcaaagtcctcagatcccttctaggatgttgcagatagcctagctgcagttccccaggttggccgcagggggcgaaatctgcggcggcctggcaggcgggcgggggcgggaggc

SEQ ID NO: 53928 - DNA, 373 bp, Mus musculus
  source 1..373: mol_type = other DNA
atctctaatgacagaactttaaaggctaagatatcagtctttctattgttgataaatacaaagaaagttaatagacttgtttatccatacttgcactgtttacaaaatacattcagtgatcattgattaatagaaagtaggtaacctatcacaagttgcctaagttttaaaattcagggctcataaaatgtgagtcaagtttcaccttctaccagaatatttaacatcaagtgattcaaggggcagtccttagagggactgtgggctttccaaggaaacactatagcactcataagcagaggagttctttgtgagagaatttcttctgcacacatctgtcagggaccagcctgggggttggaagctagtattc

SEQ ID NO: 53929 - DNA, 219 bp, Mus musculus
  source 1..219: mol_type = other DNA
gagtttggaaggagctgggaggatcctccctacaacgagcataaagagcaggtatcctgacagctgctcactgtttcaatgaaatcctggaccccggccaggcaggcattgtccggggagcgccctggatagggctgcagcatgcttcccgggaggggggcggtgcgggaggctcactccctctccctcttctgaccacatgaccaagtgggctcgcgg

SEQ ID NO: 53930 - DNA, 340 bp, Mus musculus
  source 1..340: mol_type = other DNA
cccttattgaaatgaatcattgttacttggaagaatttctttctgggctcacaggaccccagaggttctagagagacactcgggggtgagtgcatgtgcctgccagcacacacacacacacacacactggtccctgcagatatttgggccttcaaaggcatccagatatcaaggcccctaagcagcttaggctttgcaaagcccagaacatgcagctgaatactgggggatccccaaattgtaactcagttaccagttgttctgggtgtgggagtgggagaacactcatacactcattcactgcctgatgcatctcagagatctttggctctgcccaggg

SEQ ID NO: 53931 - DNA, 378 bp, Mus musculus
  source 1..378: mol_type = other DNA
aattgctcaatggagtaaacttacatgggtaacattgccattgtcatcattatcatcatcatcaccatcatgtgctgaatgtaacccacaagatgggcgcaatgcccaggcagttgtgtgtgtaggcacacctcatctagactgaaaacctagctttagaaacagtggatatctctgaagagatgagagctttaccaatcatagctaaggtattagcagtagtgataaccatcaagatgatggccacaggagtgacagtaatggtaatcgtgatctgatttcagaggtttagtcagtgaaatctctggagactgaagctgggacttccttcctccctagaggccggcaggggcagacgtggcagctgctgctgctggg

SEQ ID NO: 53932 - DNA, 233 bp, Mus musculus
  source 1..233: mol_type = other DNA
gttactagccgttgatagcagaggctcagtaacagtaactaactgccggctggcatggaactcaaatgtcagaccagatctcaaattctaatagaaaatagaaattaactaccttttggcacaatgacttgttttcaatatcacaaaatgacattctcagatatggttatctctttttgcgtgggagtccgaggcttctgaatgggagaccttggtcaattgaattcagggtt

SEQ ID NO: 53933 - DNA, 326 bp, Mus musculus
  source 1..326: mol_type = other DNA
acttttaaacatccctcatattatttggcatccaccctataatataatataatataatataatataatataatataatagtgtgattctcaacgttactagccgttgatagcagaggctcagtaacagtaactaactgccggctggcatggaactcaaatgtcagaccagatctcaaattctaatagaaaatagaaattaactaccttttggcacaatgacttgttttcaatatcacaaaatgacattctcagatatggttatctctttttgcgtgggagtccgaggcttctgaatgggagaccttggtcaattgaattcagggtt

SEQ ID NO: 53934 - DNA, 336 bp, Mus musculus
  source 1..336: mol_type = other DNA
ggtccgcgtgtgcaatggcatgcgtacacacgcgcgcgcacacacacacgcgcacgcacatttattatttacaaattatgcccgtggtggagcaagaagagatctttctgcctacattttcttgtataggaaaaaaaagaatttctcttcagatggatagaaacttgctgtccaacacagtctggggctggccagtccagagctgtgcgacagagtccaacggggcctggccctggaggcaagtcccacccaccggcagtgcggaccaactggcaggcagccggctttggacgcgcgttgtcgcgcgtgattagcggaagcaaaatttgctttgcg

SEQ ID NO: 53935 - DNA, 232 bp, Mus musculus
  source 1..232: mol_type = other DNA
aaagctgccctttgggatgaccaaaaggtggcttcgggctcggcaggaaggcgccaccaccgccttccgtccccaatgtgccccgccccgtccgggggccctaagggcagcggccgggccatgggggagccgagccagccgggaggggggcgccacaccctgggaaaaaggcttgggctttagtgttgtatggcgcaaaggcaggaggaggtagaggttcctcattcccctt

SEQ ID NO: 53936 - DNA, 477 bp, Mus musculus
  source 1..477: mol_type = other DNA
agatatatttttttgtggcttggttctctacttaagacacaaccctcacctgagatgaaagagtttagttcgcatgccccctgtctccctgggtggtcagggcttatcatgatgctgggaggattttcggtacagcatctcaacctagcgcgagacctcaggtggtcgcagtgtctcccctgggcgcgccgggcaggccagaggagccgcgctcagcagcttccgacgggcacaaggtcccgggcgggttccgagagccggactatgtaaaggcggccaggactggcccagtttgggcgtgcggtgcccgcaccaggttgcaccgtgtcccggaccgggcgactttggggcctgggcgacgcgcgggagcccgagcccgcggccggcccggctggagggccccgagccaccggggattggcgggggggggggggagccggcggggcgcggccagggggcggggcgcccggacctggg

SEQ ID NO: 53937 - DNA, 437 bp, Mus musculus
  source 1..437: mol_type = other DNA
tcaaggaaggatttatactcccttggcctggcaggtccttctagggcaaagtcttgcagtccccagcctggactcgggaggcgaggcgaggcggcgaggactgccctagcacctgtcccacttcggcgcccgggctaggactgcgcctgagcgcggcctcagtgctggagcgccagaaccacgcgcggaggtggggtgtctggcgggggcgttcccctcgggcgagacccccgccctcaaacgatcgctctccgaccccgaacggcgttgcggcacccccccccccttcctggagcggaggactggctggggaaaggtggctccgttcttccccgtggccacccacgggttccggcttccctggggctggtaggggggagccccgagaagtgcaggcccgcccccttcttgtgtcctccgggagcccagcggcctga

SEQ ID NO: 53938 - DNA, 246 bp, Mus musculus
  source 1..246: mol_type = other DNA
tccacagggtatcgcccccaggactctttcctggcggggagagcaccctgcttgcaaggggagcctcccttaggctccttctggcactagtgcctctggccccagtcttcctcaacctccctcctaaggggcatcggggtggggggcgtggagctcttggagccccgcggattgaaccggggtcttgcagcgctggcaggcgccgcccgcgaacaaggctggactcgacttcccgtcgagccctgc

SEQ ID NO: 53939 - DNA, 651 bp, Mus musculus
  source 1..651: mol_type = other DNA
agaatccccaggatagctccacgggatattgtgtgggacttcccgccgagaagcgcccagtcagagccgagggccccgggccccgccaattatcagctcgtgcgacgtgagctcgggaggggctctgccttctctgacctctccgcggaggtggggggccgcgaggctcgcggggcaggagagcctgcgcgggcccctggcaaggctccccctgccgtgctggcgaccgtggcggggttggggtggaggggcgctgtttccaccccggtgcgcgcccagcccagcctccgcccgcggggacgtgtgtgactcggcgcagctctccagcggctcgcgcccccctcctcatcagcgggtgccccccgccgcccttccctcggcgcggcctcccgggaacctcgggactcccgtcgcactgccggcatccggggcgccgccgtccctccaactttgccattggcggcggcggcggcggcggcgggacgtgtgggagaagcccagcgcctcgcccggccgcccgcccgcccggaccagcctgccccggcgccgaggtgagtcacgggcgcgggccggcgggggcaggcgggccccgaggagagcaggagggcgggcgggagggcgggcggcccccggcggccgcgaggacggacc

SEQ ID NO: 53940 - DNA, 438 bp, Mus musculus
  source 1..438: mol_type = other DNA
tcaaggacagccattgcttgactttgcccagttctggctgactgtacacctgctgtgttggccccccaggaaatctctggtggacattgtttgcaaaatgtaccctctgtccgttgccacagtgcatgcagaatccccaggatagctccacgggatattgtgtgggacttcccgccgagaagcgcccagtcagagccgagggccccgggccccgccaattatcagctcgtgcgacgtgagctcgggaggggctctgccttctctgacctctccgcggaggtggggggccgcgaggctcgcggggcaggagagcctgcgcgggcccctggcaaggctccccctgccgtgctggcgaccgtggcggggttggggtggaggggcgctgtttccaccccggtgcgcgcccagcccagcctccgcccgcggggacgtgtgtga

SEQ ID NO: 53941 - DNA, 323 bp, Mus musculus
  source 1..323: mol_type = other DNA
gaataaatcgttttttaaaaaaaagaaaggacagcttttgtgtttcagacaccagaggcccagcttgaagctgttctctagcctgaggccttcagctaccttgttgaaagaatattccaggcaacaaagccaattgagtcatgatgacacatcaggtaatcatctcttcttgaaaagacctcagcttttatcctcccagagggaagagcttcccttaggcggtggctaactggaagaaccctgtgagcctcggagctgggcagcttagtgggaccccacggaatcctttccccgggaggagacgctgctgctgctgctagcct

SEQ ID NO: 53942 - DNA, 265 bp, Mus musculus
  source 1..265: mol_type = other DNA
tcctgcttagaatttctttcacagaaaatttgtcaggcacaaacttttttgtctatacaagaaatggccagttagttttaaaacatggatggaatttattccaaaccagaaagtaaagttctcaggtcagttttggtgaccgttttgtacacagcggctgccccacccgctgcctccgggcaggcggaggcggggcccggggctttgcagcgcgcgtgccgccggacgcatgcgccgacctcctcgcggtgcgcctgcgcagtgg

SEQ ID NO: 53943 - DNA, 330 bp, Mus musculus
  source 1..330: mol_type = other DNA
ctatatagtactgttccataataagggacaggatcttcaccaggaagccttggcaggcttgatatgaacaaggtcctgcttagaatttctttcacagaaaatttgtcaggcacaaacttttttgtctatacaagaaatggccagttagttttaaaacatggatggaatttattccaaaccagaaagtaaagttctcaggtcagttttggtgaccgttttgtacacagcggctgccccacccgctgcctccgggcaggcggaggcggggcccggggctttgcagcgcgcgtgccgccggacgcatgcgccgacctcctcgcggtgcgcctg

SEQ ID NO: 53944 - DNA, 336 bp, Mus musculus
  source 1..336: mol_type = other DNA
cagggggtgggtggaccctccttgggattccaatcccgcggcgggccttcctcattggccagccaaacacaaccgactgtggcagccaatgggaaccaccctcctgaacattcagagggtgggtgctgggaggttggcgcctggtacgagcccccctacatctcagctgcgtgggggccctccacaagccactcccaattccttgggcaccaaagtactcagtaagactgaatacctcctttgctcactgcccaccgagcctatgcgctcaaaggggctgaggcgctgtgtctccagtgtgtccctggggtccagaaggggagggtaagcaaaggc

SEQ ID NO: 53945 - DNA, 339 bp, Mus musculus
  source 1..339: mol_type = other DNA
tttaaagaaaatgatcatgtaagcagtattttagcaagtgttcttgaaaatcttttttaaaaagtttatgtaattacaagactctatattgtgtttaaaaacaagtcgactgaattcctcttttctgttgaaacgtgaaaagtatatcaagtctggtgtttttaaaaaccgggacttttaatgttccccggggcaatcacagatcttgtattcgcacagtgttctggtgagtgcacatgctagcactcatcactggcctgtcaccagggtcccatcaggcagtgcgtgctatatagtcaccgctgtggcgccaccgccgccatttgagtggcaggcacc

SEQ ID NO: 53946 - DNA, 228 bp, Mus musculus
  source 1..228: mol_type = other DNA
atcttaaaaatctctcacttagaaaaatatttatttcccttcggaaaagaggcttaagggttcaaagagcttcttctctcatttttttaaaaaggcaaagcagagcctctgctctggctgggcgggtgacaaggcgcctcctctgctctcactggtgagcacctcccgaagcctgcaggaaggcgggtggctagctgccgaccttcgccactgttgccgaggcgacgc

SEQ ID NO: 53947 - DNA, 366 bp, Mus musculus
  source 1..366: mol_type = other DNA
tatagtcatacctggtattgctataaaagtagacattaatatcaatgaaagaataaaatgccaaagctattcctatttaatttttgacaaaggaagcaaaaacatatattgggaaaaacttaagaaatatgctggaaaaactgaatttctatctgaagaaggaggatcttctgccgccccctgggaggcacagataacgtgcataaattgtctctcattcacaacctggcagaggaacacagggtccccccatcgctctccatcctgcgcaggcgccagggcttagcgggccggaacttccggcggaagttccgcctcgcgggccccgtgctccaatctgagctgggtgttcgggtcgcgggagct

SEQ ID NO: 53948 - DNA, 417 bp, Mus musculus
  source 1..417: mol_type = other DNA
agtcccttcttttatcttggctagcatctaaaatacttcaataaagtgttccagataactcttagtctgaaatgtctgttttaacaaaacttgtgtctcaaatgtagaatgaggtcagacttccaactcaaaccaaactgctaggtttaggtggtgcgcatgcgctcccagaacatcaactgggttgcgcatgcatgcggatgatgcgcatgcgcttccagagaggcaactgggtgatgcgcatgcgcttcagagaggcaactgggtgatgcgcatgcgcttctggagaggcaaatggggcctttaatgcgacgtccattgagatgacgtccactggggcgacatctgttggaacaatgtagatggggcgacgcccattgggcgtggccttcagggcacctactgaggacgccagca

SEQ ID NO: 53949 - DNA, 684 bp, Mus musculus
  source 1..684: mol_type = other DNA
catagttttacttaaaagatgttttcttgaagatatgtaagatatttttctagttgtattgtgcatctgttatgagctatagcattatactagtatatggcaaagccatcaatcttcaatacaagaatacagcttaactgcctatctatttagtagatttcttttggtatctccacatcacatttacatatttaattatgacaagtcctaaaggaaaatataattcccaattagaagtacctagttttctaatgactctaacaaaaggcaaacttttacaaggtatatttttaattaaaaatttaatcttaacaaaacggaaatgtatatgttcatagcacatgtgtttaattatgattgaagaggcttaggcagtaggattcttaattcaaatagatagcagcattcttccttaaatgaaaatgtcaaattataatgcaatgcaaacattctttctcaaaacataaatacttttctagtattcaaaagaatctcgaaagtaacactgtcctgtatttcaactcaggaaagctttgacttcatctcgatacctaagcaaatattggatacttctgaggaataacagtttcctgtgacctcaaatcgcggttctctgatgccctagccaatgggagaggcttcaagctattgggccccattgcctggcctaggccatctagtaga

SEQ ID NO: 53950 - DNA, 353 bp, Mus musculus
  source 1..353: mol_type = other DNA
caaatatcaaatactttcaaaagcataggccgtggctactaagttggcagcaactgaaggcgcaggcaggagaatatcactccctctcctgagaaaatctcaaggccagggcaaccagagctttaaaattatattttcctaaggatttaggggactaatttccgctgagactgggcttcctgacagcgaatgacctcgaaggagcttctggaaaaccggcctaattttaaacccaaagtcagagctgctctagacaggagctggtgggggaaggggctgcagggccagaggccctcccctccggcgggagggggcctctcatgaggccctgccccctttgggctacttagagc

SEQ ID NO: 53951 - DNA, 443 bp, Mus musculus
  source 1..443: mol_type = other DNA
ccaattatgatttctgacagagaaaaaaaaacacccttggagttttcacgttcagggagatcaattttatggcctatagatctgtcctaaatttcgctaagctcctagtgggattatcctactccaagatcattgcatcaaaaaataagataagaatctagattttatagaaagcagcctgaaaagttgttttcctgaccaggaaaacaaaattgtcagctgaattttggctttatacacatttgtctatgtggtggagagagagatcccactctctgacaagctctgacagtcatcaaggctgcctaggcaacccttccataacaacccagagctgctgagctccaggggttctgagaactgacatttcatttgctgcagcaacctcatagattatgtgccattatcctggtcatacccaatccctattgggtagtgaataa

SEQ ID NO: 53952 - DNA, 349 bp, Mus musculus
  source 1..349: mol_type = other DNA
tgtagtcaacaaatttttcaaaacattgctctcatacttccctaaggcagttaaggaggaagtggaagcagcagcggctacactatcttattaggggggtcacacaactattaaatgtacaacctaaatagattctgaaagttcacgtctttaaagcctggacttttttcccaaactagactttgaagactgtctaagttactaactcctcaacagtaaaatcgagagaatgtgcacacagtaggcatttcaactattgtatttaagaggtggctctacatacagcttcagctgtcttgggagctggccctctctcgacaggcagggggcaggggcctgactctagctt

SEQ ID NO: 53953 - DNA, 356 bp, Mus musculus
  source 1..356: mol_type = other DNA
ctgtctccccagtggtgtgtccacacacagtggcaaagctaagattttcacatctggaatttgtccatagtcgagtatgtgtatcattctaaaatgacactgcaagtggactttgttttctaattttaatgaattaaataattatcaaaacccttatgtgtatctactagacacatagcttggagtcaggcttgatactctggccagaatatttttacagtttaagcgccaccgtgagggcgtctctaggaaattcctgttgctggagtccgggtggcgatccgggcttctgttcccagggcctccctccagggcccacgtgaggggacctggcctatggcagccgagggtgggcg

SEQ ID NO: 53954 - DNA, 390 bp, Mus musculus
  source 1..390: mol_type = other DNA
tcaaggtgagttctcattttacataggtgagactcctgtgactgctattattatcactgtcattattcactcctggagttgaacttaaacactgtgcgctacacgcgcagaaattgtgagcaattggccgttcctcatagcctaaggtaaggacagactcaggttaaagtgacttgaggcggctcggtggccccacccttggccaggtgggggagccaagcaaacctctgggaggctacaagcaccccagcctcgcaagcctgtctgcaacgtggcccagctcccctgacaccgcccggcagcggggtggaggcagggccaaccggggaaccgcccccagccgcctcccagcctaagcgttcgggcgggttgctggggtgcctccacccc

SEQ ID NO: 53955 - DNA, 685 bp, Mus musculus
  source 1..685: mol_type = other DNA
ccccgacctgtaacccggccgggcggcccggctcgctcgctctctcggcgctcggcagggcgcggccctagcgccacccggctcgcccccccaccggaagtgaacgcgtccagtctcgggccagtgtgtcagggaaacccaaccggagtccctgcggccaccgccgccgccaccgccgccgccggtccgcccccgccccttccccgtccttccgctagcagcagggcccgggcggcccggtggccatggccttggcttgacttagcctcccgggcggctgggagcgtgtggccaggacggcggcagaggtggcggctgcgggcgccagcgtggaggtcaggctacaggtcacacgagctccgcgggaccctgggggcccagagaccccgccccagcgatagcgagcgagcgagcgcgcgcgcgcgcgcggcggggcccggaggcttcgggccggctcggcaggcagcggcgccggcaggaagcggggaccccgggcccctttgtgtgcgcagggcgggggggaggggtggcgggcagcccccggccgccaggcccccgccccttcccgcgtgggggtgcgccgcggctccccccaaccgtcgctcggacgctcgccggcgcgccctcctccccacgccccccaggccgccctgggttcctataggaagggcatcagcatcccatc

SEQ ID NO: 53956 - DNA, 390 bp, Mus musculus
  source 1..390: mol_type = other DNA
ttattacttttaatttgtaacattattgtgagccaccactggaagagcagccagtgctcttaacgtcctttctttaaatatgaataaacaagcattgacagaaaacattattccaattttgtgttttgagtatgtacttggataaattttatgtgagtatatatagagatgtgcattaatctctcatttccctagacattagtggatgagtagtcacacaaggccagcctggtctacagagtgagtttcaggacagccagggctacactgagaaaggaagaaaaaaagaaagttggcctccctgtttattctctccgactataaagccttaaaagatataaaagcctcattttcatagagcgctctgctggggcctgagtccaggggtct

SEQ ID NO: 53957 - DNA, 551 bp, Mus musculus
  source 1..551: mol_type = other DNA
cgggagccttgcgcgccccgctcttcgcgctgctgcctcgaggccgccgcaggcggatgcacgacctcaggcgacgctgggacctgggctccctctgccgggccctgctcactcggggcctggcagccgtgggccactcgctcaagcccaggtacgtggtgagcgaacgggctttcgctccgggtccagggtgagcccgggcggcggggttgagcgcgcaactgaccgctgttccgcgggaaagggctgcgctgcctctgcttgcaaagtcaggcagcccgcgggctccttccttctccccctggggaaccccgaagccccagctcacttctagaggccacccggtgagcaacgggacgcgcgccaaggagcccgggtccggggccccagagagtcccgcgggccaacggagggatcctgcggccgcggagagaagccacagcgctgagcaagcggggaagggcgccgccgccgccgtggtggagtactgcaacggtggcgccacggggagggggcggtgcgggagcgaggcgagcacgggccaagctccc

SEQ ID NO: 53958 - DNA, 569 bp, Mus musculus
  source 1..569: mol_type = other DNA
ggccgtggcagtggcggcgaggggcgacggctaggcggggtgagtggcgctacctggccaggcggggcggggccggtccggggcggctgagggcggcgattgccggcgactccagttgtctctcccgccagcggggtcagcccggggcttagggcacgcctttaactaggggccccagtttgttgccacagcaaccacgagcctcggcggcaggagccccgtgcctgccccggccggccctcccgcttgcccgctcgccggcccgcccgcccgcgcgcgccgcggcggcttggggagctggggcgctcggaggtgctccgagtggactgaaccaagcggtggcgaccgcggggggtggggagggcgtgctcccgggcccctcccctagcaagccggccgagttggggggactcccccattaccgagggcaccccacaaactagggtctccttaggcctgagggctgccgctgactcggggcccggtagcacgtcccagccctgaagttctggagtaaaatggcggaaggctcgcccggcaccggggccacctagcgcagcgcagcgctg

SEQ ID NO: 53959 - DNA, 291 bp, Mus musculus
  source 1..291: mol_type = other DNA
aaatgtaattgaggaaaaaaatatttaaaaaatatttttaaaaaagtgaaagaactctcaatacgggaataaccatttcttaactgctaaggttaggaaaaaccctttaaaagccgtttctaacagctggaataaccatttcttaactgctaaggtttgtaaaagtgaaaaacattttctaacacagtgggttttattttgtacttcccacagttcttagaacaagagaagatgagagtaaatattatccctgtcaatcttctgatccgtgggggtctgcctataaaagga

SEQ ID NO: 53960 - DNA, 285 bp, Mus musculus
  source 1..285: mol_type = other DNA
agccttgtttgatccagcccatgcttggggtggttcctgggaaactaagaaccatcttgtgacgtttccggaagggttgccgtgcttcctgccaaatgaggcagctggttcctgaggtcagccccagaaacaagtggggtccagggcttcagagcccaagcacacaagtctagagtcttgttagggtcctacagctgtgggactaaggctccatgttcgcacaggcatccgggaacttggggggtacctgaaaggaaacagccaggccgctcttcctgcatccgg

SEQ ID NO: 53961 - DNA, 564 bp, Mus musculus
  source 1..564: mol_type = other DNA
aaagcttgtgacaggggctcaaggccccaagatccagatcaccaggatctcttgagacttggccccttaagcgggaagaaactgccctttcctctcttgctgggggggggggcggggggcaggttccccgcctctgaagagggcccagcagggcgtgtcgcaagagggagcgccgcgcgccccgtgcgggccccctaggaagtggatttggcccgctccagatccaacccagcttctcccggcccggccctgcgtgctcccgcctgtctcgggtagggccgccccgcttggccaagtttgcggagcctcgctgtgcgagccgggccagtcaatcagcggcagagaagggcacagccgtgcggccgagggcagtgagctgagccgggctgggtgagcggagcagcgccgggtggctgaagccccgcgccagcgatcgcccgccgacgccgcccacctggctagctggcccgggttctctagccttcggagtcccgaggtcacggatcctcccgcaccccggctgggcgcctggcaccggggaccgttgcctgactcgaggcccag

SEQ ID NO: 53962 - DNA, 321 bp, Mus musculus
  source 1..321: mol_type = other DNA
cacacacatgcacacatttactttgtgtggttctattgaatgagacccagcaagttggccacagctgcattgggaaagggttcccaagaaacctttctcagaaaactggccagaaagacctccacgaacttctcccagagccagtcaggggactgctgctgggaagccaatcagcgtgcctctgcagcccctctgcagtagttatgccagagcagggcaggattgccgggagccaccgcagtcctccaggcagcgcggctcgccttgcctcgccccgccccgtcggctccgccccgggccgccccgcaccgccaagctgtt

SEQ ID NO: 53963 - DNA, 352 bp, Mus musculus
  source 1..352: mol_type = other DNA
tccctaatacatacctaatggaaaaaataatttgttgtaaataaatttactataatctgtagacaaactttaacagtactgaaatttaaccacttcaatgctgtatgccatcaactaaattaaaaatattactctaagaactgattcacatattatagatgctggtgtgggggtactacaggcatgtgttacacagttataactttgggctaaactttcaaagaaggatattcacataccttttatgtaaagaatgaaattagacttcactgttcaaataagtcaataaaaactttcactaaaaaataataactaaagtcattacagggttactaactttcatttattttga

SEQ ID NO: 53964 - DNA, 413 bp, Mus musculus
  source 1..413: mol_type = other DNA
cgtggaagacttcaaggttacactcctggagtatgccttggccatgtcaaagtgctaacaggcagtgccagcacttcttacattaccatggtgatttaatcagaggccgctgagtccgaagcagcttacaatctcttgcatttgaaaagcatatcttgagaaatgatttgaacggcacaaaaggctctttcagtgtttcgccgagaaaactctactgcagtgtgagcacttctagtactcctggatcaaccaaggtcttgttgaagcaactacattttgcagatttgcagttcagcgtatatgtgaatatatggctgtgcaaatccatgcccattcatccacaggtggggattggtgcggaagaaagagggtttttaatcgtcttttagtttaagttatgttagactgtaata

SEQ ID NO: 53965 - DNA, 324 bp, Mus musculus
  source 1..324: mol_type = other DNA
cagagaaagtatagtatggttatcctttaattttgtattgacgctaaatcataattttagtttgcgtgcacccaagggacattaccattcataatgcctggcaagtgtgaaacttcagcagtagcttcacatgccagaactgaaaacttttgtgaggtagtgcgcatgcgcgcactcgttgggacgtggggacacctgggtcccacaagggatgggacaagcgcttcaggagcctgaccggctgtggcactgtggcatcccatgggtgcctgtgtgtcactgggcggcgggggcgggctttcccccctaggctattaaaggcga

SEQ ID NO: 53966 - DNA, 288 bp, Mus musculus
  source 1..288: mol_type = other DNA
aagcgagatctgattggatattaaatttgggcagcatcaaacagatgctcgcaattctgcttgagctccaccgctggccagggagcacagagaaagtatagtatggttatcctttaattttgtattgacgctaaatcataattttagtttgcgtgcacccaagggacattaccattcataatgcctggcaagtgtgaaacttcagcagtagcttcacatgccagaactgaaaacttttgtgaggtagtgcgcatgcgcgcactcgttgggacgtggggacacctgggt

SEQ ID NO: 53967 - DNA, 219 bp, Mus musculus
  source 1..219: mol_type = other DNA
atatatgctaggccccggcatagtagcctttcgtgtaaactagttgtcctcaacgtttttacattcaaatgggttcaagaacaactttgcctaatgtagaacttctggctaagccattggacttgactggcagaagccaccacagtggccgccctaccgggcatgctcagtgctctggtccggcctgcagcgaccggttccttcagtgcccggtccctt

SEQ ID NO: 53968 - DNA, 397 bp, Mus musculus
  source 1..397: mol_type = other DNA
cattttgtgagggagaccattgcgttctccattttagaattgataaatataaagaaaatcactcatcttttttgattatggcaataaacttggaaggtatttcatcctcatttctctttgccggcagtaagggctaaggcctgtgcatttgcttcgcgggaaaaccggttccccaggacctggtcccaggctttctgctcctgccccccaagcctcagccgggcggcagagcggagaatacgcgcgagcaggaggcggggcaccccgaacctttcgaggggccggtctgcgcgcgtgcgccgtccttcggcggcttcaaccgccccggctcggtggccaatcagagtgcccggcgcgctcgagacgtctcaacgtcctgtggcaacgtaagggcgct

SEQ ID NO: 53969 - DNA, 504 bp, Mus musculus
  source 1..504: mol_type = other DNA
gaattcacagttgtaattctcctacctctgtagtgctgggattacacatatgtgtcgccacacctgactaaaatcaacatgtaagaaatggcatcttatttggtaatatatgaattccaccttaacaatttttattttgaagcaagatcttatttttttaaaccatacttggcttaaaatgctcattttatgtaaaggcaaaaagcattttagggctccactttgtagaccagacaaaggcgttctcaaatcttatgactaagtaaaaatttgtgaaagaactgggcctaaatcttgaggaatcacatcatgatttagagctgtttagactcatgaaccattttcttcagaaagaaaagaactgcctttggtggcgcgcgcgcgggagaacgcccagcggagcctccggggacggagcctgggcgggccgagagggcgggccgaggggcggagcctggccggcagcgtttctggttgggcttacctcactgctttccggagcgg

SEQ ID NO: 53970 - DNA, 510 bp, Mus musculus
  source 1..510: mol_type = other DNA
aggacatatggttttatatataggctaaaatattaaaactatgtttttcctcaaacaagaaaaacattagctgtaagctttagaaaaacaggttaccttaatcatataaatagccatgaagataaataaaaatgaaaaaacatcaggatgtttattactatttatttatttatttatttatttttgaggcaagatcttatgttacccagactcaaacttgtggcattataagtgttttgaggataaaatgacttattaatagtaaagggttgcataaataaaatatgctcttctaagacaatgtgataggatgctatcattaagattgatatttctgaaaataatttttgtgacataaagatgtgccacaaacactaataaaaagcgtttaatgataaacatgcaaaatattttcttctccgttttaattttacatacatgggatcaatatacagatatgagaacagatcaaaatattatagttatcctgagttgtgctttaatgttatt

SEQ ID NO: 53971 - DNA, 394 bp, Mus musculus
  source 1..394: mol_type = other DNA
tatttaacatcaagtatttaaggatgtcatttatttaaagttcttgatttgtgagtaacaaatgtctttataaataagcatccaggaatgtatgtttcatgaacattctcatgctttgtccttaaaaataactaatgacgaggtgatagaacggaggaaactactagacaagtctattccatgcctatagtattcagtaaaaccaactgggactacccagagggatttttttttgattatcaaaagttccttgcaccaatttccaataaatacagcaattcatgttttggagtattgccaaggttcaaaacatgaagcgctgcaacacccctcgtctagtgagggtcactctacacagtccaagggcctgggtgggtggaacagtactgcagtg

SEQ ID NO: 53972 - DNA, 285 bp, Mus musculus
  source 1..285: mol_type = other DNA
cgtctagtgagggtcactctacacagtccaagggcctgggtgggtggaacagtactgcagtggcataggccccatgggagggagactctagaacagctcccaactagagttgtcacttgctgctcagagaaagtccccatttctctttaaggggtccggtctccccccaggtggtactgagagggcccactacatggcagtggggacatggggacacccttgtcactgcctagaagtctctgagttgtgactgctgtgattaatcatggcacctccgtttccctg

SEQ ID NO: 53973 - DNA, 241 bp, Mus musculus
  source 1..241: mol_type = other DNA
ctcaaaacttaagtagtaaagactttccttctcgccaggacctaagggagtcctctacctgagggaggagaggcttggcttagccaaagacttgggccctagtgacttgcaggccaaggctgtggctctgcgtgtccgcacggcctcccccctccccccttccgctccggggcctccgagcgagcgggcgaatggttgggcggggcgcggagcagcgcatggccacgccccccgggccggc

SEQ ID NO: 53974 - DNA, 297 bp, Mus musculus
  source 1..297: mol_type = other DNA
caaattggggagctccggctgtcaaagcaaatatctttcagatgcagctagccctgggcctgtgaggaaaagcagcaggctgtccctgccatctgccaaggcagagaggcccccccccaggggtgaactggagctggtctgctttatctcaaggcagttgcagttctgagcccaccttgaatcacggtgagcgatctgctgtcagctggcttctctctccagggtgcactctggggattcgcgcttaaggcattaatccagtgagtccaaaatttgaataaatatttcaagactctt

SEQ ID NO: 53975 - DNA, 348 bp, Mus musculus
  source 1..348: mol_type = other DNA
tctaataaataataataataataataataataataataataacactaataagcagcctgcagttccagaaggcttcttggaaagctggagctgaatcttcagccgaatgtaaagctatactagagagggaaacagcttttcttacgtaggtagaagctatgtgtgcagcagccaactgcttctcaattaacatgtggcctgatagtttcccattgtctctggtcatttggaagcagcatgctttaactcctagtttaaatctcaagcagttagcgctgtatctgaaaaagaatgtcatgaaacaaaatctcctggaaagtatttcccagacattataacctctaggag

SEQ ID NO: 53976 - DNA, 406 bp, Mus musculus
  source 1..406: mol_type = other DNA
cagggttcccggaccaatgccaccccccctggaaacgccccgcccctttgaaggcgggttgctacgcctgcgccttggccccaggatcattggagcagccgtaaggcgcatgcgcagtgcccaatgggccggaagagctggcccctcggaggctcccatttctgaagcgtgggaggcaaatttgagctccagagggtcccgcgggcagcgccgcggtggtgcagatcccttttctgcgtgcaggcgggcagggaccagggagtgaacgccatccctgcgctgaggggccccggggaccggggcccagagcatggcggagaggtggggcagccgaggccgcctggccagctgtcaagtcctcattgctagcgctgcaaaggcagcctctgtaaatgtagccgagccg

SEQ ID NO: 53977 - DNA, 447 bp, Mus musculus
  source 1..447: mol_type = other DNA
tcagatcaaggtgtgagctcagagttaattaaaagctttcttttatataagttgtctaaattgtagagtaaagtaactaagacagttaaagtcttttggaggctcaaagccttcaagtattcaacatatgagtttatgcagagtactctcattcagactgaacaggtacaatttctattgtaccagtgagcatatcttgccaggtccctgttgggtagaaataatgattatatttcttccttagtaatattcatagtaccttccaacactatgaaagctagtatttgattctagtatgtagtatttttgagattaggatcttaccatcaagtagagcaatagcaatagtttataatgtttgatattagagatatctgttccctcagggctgaccttacagatagttgtgaccagcaaggttgaagtgttactttaaggttgctatgg

SEQ ID NO: 53978 - DNA, 612 bp, Mus musculus
  source 1..612: mol_type = other DNA
aactcctgttttttacaagagcagcaaatgctcttaagcgcttaagcactgcttgagattgctgagaactcagctcaggtcttctgtttgctaatttcaaaccaatttcgtaactattatatttcccatactttgtaattttgggtgattgaaaagtatctaatgagatgatttaatattttttcagttgttataatacttccttgcatgtagtaagtgccatgaatgtttttaaaattaatttcagctgtcacatgcatcatattatgattgctagaatctaagccttggaaagaaaacaaatcttttatttttgtctaatgagcagttcacaacgctgccgctccaggagatccaatgacctccatgggaatgcacgcatgcacgcacgcgcatatataaaaaaatatttaaaaaatttgtagtgaaataacgtgaaaatcgctttcacttgaatattagtccaaactactaaaaactgaggcttcagtctccaaactcagggttcccggaccaatgccaccccccctggaaacgccccgcccctttgaaggcgggttgctacgcctgcgccttggccccaggatcattggagcagccgtaaggcgcatg

SEQ ID NO: 53979 - DNA, 271 bp, Mus musculus
  source 1..271: mol_type = other DNA
catatataggattaagaatagagatttcccctttaaaagtcaattgttattttgtaactcaaatttgtcttaatgaatactgggattatagtcttgttctaccatgccaggcttgaaaagctttaagtagaacggcacctataccttagactgagccaactggattgctgtctgggcgtatggaatccccgcccccggctagaccccgccccgggcccgcccccagttgcgactcatcctcctgggcggggagaggtggcagtcgagtcct

SEQ ID NO: 53980 - DNA, 253 bp, Mus musculus
  source 1..253: mol_type = other DNA
tatcctttaaggatccataatggaacatccataatatagcttttcagtgatgtgccaagcaattttaattataaggcatcatcacatagattaagttatactgcattgaggaaaatttccataaattaattcttctgtagacagataccccagcctctgaaatgctgggattacagaatgaaagtcttgggcacaaattactttgccctgtgggctgagatcactatagatctacccccttcccgagaccttg

SEQ ID NO: 53981 - DNA, 278 bp, Mus musculus
  source 1..278: mol_type = other DNA
aagatgctgaggaatttatattaactatgtattttccctgacattggaaaaaccttttgcgctcactgtgtcaggagttgctattgactacaaaaacagcctctcaacatgagagctagtccttctcacacagacagtgaggcagctagctctctagggtgtccacatcctaggatcaatctctctcttattcctcctagactctctgagaccaaggtttttagaccctgtggcatgggctctgcagacaagcttgggtcccactgcgtgctcagctg

SEQ ID NO: 53982 - DNA, 355 bp, Mus musculus
  source 1..355: mol_type = other DNA
gcttcgacttttgcaagtgctagaaatataagcccaagaaaccatgcttggctatcttttctaatacttaattattactgtttttttttaaatgcccttacaagcacaaagccctggctttattccctggaatccagttacaggcaatatgtaaattgttgtgtttaaatcattttgcatgtcaataatgaactccttggcttaatgtactaattactaaatggggaaggttgctgagcatgctctctcccttgagatattattccaactttggaagtttggaagctaagaaaacaccaggcttgcatttttgaccccaagtgtgctaacatttgcatccctagtttggaaaatg

SEQ ID NO: 53983 - DNA, 242 bp, Mus musculus
  source 1..242: mol_type = other DNA
agggttttaagtaaatcacggcatgtaccacgtaattttctgtacacgctggggaattaatattaattatgtattctccctgacatttggaaaaatcttttacaaaaacagcctctcaacatgagagctagtccttctcacacagacagtgagagctagctctctagggtgtccacatcctaggatcctctctcttattctgcagtgacagggaattgcaccatcctcctagactctctgag

SEQ ID NO: 53984 - DNA, 317 bp, Mus musculus
  source 1..317: mol_type = other DNA
agtcatgacctttaagaaacctcatttctgaagggaatttctttgggctctaaggaagttaaagtcacagcaagattaattggtgtcttgcatacaatgcaaaaggtgaattgtggtagcaatgaagattaggagtttctatgataatacaggtctactctctgaacattgtccaaacactgttcaaccagtttttattctgaacacatattggattttgtttgtcaacacagagacacattgctagcacatttatatgttcttgctgtgctagggacaaaatgcataggaagatccatgtttctcctcctgatgct

SEQ ID NO: 53985 - DNA, 442 bp, Mus musculus
  source 1..442: mol_type = other DNA
ccatgctatagccctgtttccaggcttgcaggcctgtccctggttaagctggggacagcctgtccaggaggccctctgtaggctatgatctctaaatgaccaaggacaattccagggacagagtggcccatctcagtttgttaagctgaaaggtggctgccacatggcctctgctactcaccatagggcaagtttcactagtagtccacgtatgtatattggaatgtgtgtgcgcacgggcttgtatataaacctgagaatcccctgtgttccaagtacaggaaggatcacatggagggagaaatgagtgtgaggtctgaggccccttcctcttagacctcacactacagggaagcccatccctggccatgctcaggcatgggctatggtgcagagctaggactcagcagtgagttcatgtcccattctggccctgattagt

SEQ ID NO: 53986 - DNA, 405 bp, Mus musculus
  source 1..405: mol_type = other DNA
tccactatcctagaggattcccgtccttgggcctaggctagcctaggctcagaggagactacctcctcagacagcaaagggggtgggggggttcctttgaagtggggctcttaaacctccagccatgacctcctcggagtgcaaagggggtctcctttaccggacctttgaagtttgacccttaaacctttaaaggagcagctccaggccatggaaagggcagagctgaacagctgcaggtctggcgccacattcagggacccaggagcaattagggcctagcttcaggcgacctaagctgacgccatatggcgctgtttcagcagccaggaaggcagtgacctcagccctcccaactgtggcagcggcggcggccctgtctggcctggcagtgcgactgtcacg

SEQ ID NO: 53987 - DNA, 284 bp, Mus musculus
  source 1..284: mol_type = other DNA
ttttgtacaattggaatttttcagagaaactacaggacttccacaaataaatgtacatttttatttctttttaaatttttaaaatttatttttccagacatttttctctttaattttaaaaattattttgattacgtgtatgggagggtatgttcacatgaacacaagtgcccatctagggttacagggaactgtaatatgctcttagccactgagctatctctctagctccaaatgtaaaactttacaccctgttggaggagcagcccaccacggggtgcccc

SEQ ID NO: 53988 - DNA, 183 bp, Mus musculus
  source 1..183: mol_type = other DNA
aatcagtgatcaatttctggagttctgtactcaaagtcagatttagtccttgaatgcatacaataaagttgtctgtttttaaattattgaaatgtaaataaatcaaatttatgctctatctttcattgctttactcaaatattaggacaaacgcagaccagccctcctgctgggctgggactc

SEQ ID NO: 53989 - DNA, 316 bp, Mus musculus
  source 1..316: mol_type = other DNA
taaccagggcacctttgtaaagacaaatttaatctgtgtggtcatttgtgagctgacatgtcctagccatgtgatggtctggttaatcacaagaggtgggacatctgacaaagaagataagagatctcttttgagctgaatttctagtcaggaatcttttttttttttttaacattttaaagtaataatctcttgttgtaaacagagatgtctgcctctgtaacttgaatggacaaacatggaaagtttatccttcctatttgctacataaacactggctgttgagcagctaccctggcactccacacgtggcagt

SEQ ID NO: 53990 - DNA, 497 bp, Mus musculus
  source 1..497: mol_type = other DNA
ggcagattcagagagaccctgtctcaagatttaagttgggtcaggcgaatctcacggaatatgattgagaatacaccagatgcctccttatgcacacatatactgaaatgtatatacataatttttactgaatctcttttttatgatttacacaatccattaaaattatggtgtttttttttctttttctggaaatagacaatattaggaaaatgtcatatttttataatgtccactgtatagtaaaaataaacaccttgttgctcttggagagaaccaaggtttagttcctaggacccacataatggctcaccatgttgtataaatacaagttagttaaataaataaaacaattcattttattttaactttcaagttagtattgcaaacttggaaatcctttcttcgatgacagaagacagatagagcctctctcacccttagtacgcatgtgcaaacacggccaatcagcaaggggcttggctgagactgttttc

SEQ ID NO: 53991 - DNA, 432 bp, Mus musculus
  source 1..432: mol_type = other DNA
cagtcccagttagctagcaaagtcccgaagttacttttagtgtgacgacctgcctttcccacacccttgggatcttagttgggggggggggggggcacgacacttctccccttccagggccccttccaccagggaggtcctcctagtaggaagcagaatttcgtcccatttgtgagagctagtccctttcaaatgtctccctgcatccagtacagggttctaggagccccagggtgaaccaccggtcacaaccaggcccccggagtcagggagggaatccccaaggggtcccagcctcgcaaagactgcacgagccctgctggggaagaaaagtaacttggtttttctgagaaacccagccggattaggccctcctaggtgcagagattgtgggcagaggagggatcggcgctctcctgcggcggaggcacg

SEQ ID NO: 53992 - DNA, 405 bp, Mus musculus
  source 1..405: mol_type = other DNA
gagaaatatgcaaattaaaaaatatatcattatgtgtgtttgtttgtgtgtgtatgtgtgttgggttaacataaatttaaacacaccacatgtatgtcctgtacagctgttaaaagcacctgttctgctcacaatttatgcacagctaaagtttcagaaaatcagagagggcctgcagggcctagcacactcttgtaatcctggatgctccattctgatcgtatgtatgttactctacagttgaaataaagtagtgccatttgcagtgtttcatatgtttcacatgtattgttcaagtttttcaagtctgtaagggcttatacatgtagaaattgtcttaaagcatgtgcagggtatattcagccaactgcaaagggtcctcaaatcctctgtccgggcatcgtt

SEQ ID NO: 53993 - DNA, 379 bp, Mus musculus
  source 1..379: mol_type = other DNA
tttgaaatggagaaatatgcaaattaaaaaatatatcattatgtgtgtttgtttgtgtgtgtatgtgtgttgggttaacataaatttaaacacaccacatgtatgtcctgtacagctgttaaaagcacctgttctgctcacaatttatgcacagctaaagtttcagaaaatcagagagggcctgcagggcctagcacactcttgtaatcctggatgctccattctgatcgtatgtatgttactctacagttgaaataaagtagtgccatttgcagtgtttcatatgtttcacatgtattgttcaagtttttcaagtctgtaagggcttatacatgtagaaattgtcttaaagcatgtgcagggtatattcagccaactg

SEQ ID NO: 53994 - DNA, 353 bp, Mus musculus
  source 1..353: mol_type = other DNA
cagccagcttcaaccctatagcccattggacacgcagactttgtgtgccccggtacaatgtaaatgagctaaatgtgagagagacggcctgcacggcctagcacactcttgtaatcctggatgctccattctgatctcttaggacatgttgtgtgcttatgtacatgccgaaaaagtccacacacattaaatgttaatagttgaaataaagtagtgccatttgcagtgtttcatatgtttcacatttgttcaagtttgttcaagtttttcaagtctgtaagggcttatacatgtagaaattgatgtgcagggtatattcagccaactgcaaagggtcctcagaatcctctgtc

SEQ ID NO: 53995 - DNA, 418 bp, Mus musculus
  source 1..418: mol_type = other DNA
gagaaatatgcaaattaaaaaatatatcattatgtgtgtttgtttgtgtgtgtgtgtgtgttgggttaacataaatttaaacacaccacatgtatgtcctgtacagctgttaaaagcacctgttctgctcacaatttatgcacagctaaagtttcagaaaatagggggcctgcagggcctagcacactcttgtaatctctggatgctccattctgatctcttatgtacatgccttaaaagtccacacacattaaatgttatgaacatactctacagttgaaataaagtagtgccatttgcagtgtttcatatgtttcacatttgttcaagtttgttcaagtttttcaagtctgtaagggcttatacatgtagaaattggtacgcatgtgcagggtatattcagccaactgcaaagggt

SEQ ID NO: 53996 - DNA, 482 bp, Mus musculus
  source 1..482: mol_type = other DNA
cttgctggctagccaggctagtggcatgcagattcagagagaccctgtctcaagatgtaacctatagagagcagatgtctatgcacacatatactgaaatgtatacacatcatttttgctgaatctctttttatgatttacacaatccattaaaattatggtgttttttttctttttctggaaatagacaatattaggaaagtgtcatatttttataatgtccactgtatagtaaaaataaacaccttgttgctcttggagagaaccaaggtttagttcctaggacctcccagtcatgcatgtgttgtataaatacaaacatgcaaaaaccacgttagttaaataaataataagagagtcttttgggaattcattttattttaactttcaagttagtattgcaaacttggaaagacagagcctctctcaccctgcaaacacggccaatcagcaaggggcttggctgagactgtccccccccc

SEQ ID NO: 53997 - DNA, 433 bp, Mus musculus
  source 1..433: mol_type = other DNA
caaagttaaaattttacgaaagtaggtcctttcctggagctcattagtcagcctaaataacctgaccacatgatgacacccatggtatcctttgtctgcacatacacacatacaacacatatgtacccacacaaatatataggcagacaagcatttttacttatggaaaaacaacattattcattgttaggatgtttgttttttatatgaagcttcttgggaagtctccttatttttaaggagatattttatacttctgaatgagaaataacaatagtgcataaataattcaatgaatatagacaaaatgttggttcaaaattgaggagtttacatttttttgcttgtttctgttcaggtaccgaggtcagaatagggcccaggatccatgtgacaacccttgggcccatgtgcctggaggcggtccccaatc

SEQ ID NO: 53998 - DNA, 383 bp, Mus musculus
  source 1..383: mol_type = other DNA
gtctcacaagagacagctatatctgggtcctttcagcataagaaggggcaaagtgtccacacggaatttcataaattcattcttaatagctgagtagtactccatttatccattcctctgttgaggggcatcaacaaacaaacaaacattcttctgttttaagttccagtaagacatgaaattcatcttcttgtaagtgccttttacagtattaaggaaaaagcagtttcttgcctggggatagatatccatctctgccgtcagcagctctgaggtcaggctgaaagtcagtctagctgtgactcaccagacaccagaagcagtgctagaggctaatgcttcatagactggggcccactgtgtccaatttttcctcaaaacgg

SEQ ID NO: 53999 - DNA, 451 bp, Mus musculus
  source 1..451: mol_type = other DNA
cttggatgaagctgtcttcagttgcttccaccggatcatcaaggaggaacaagaacaagcagcttttttccttgctatcttagggctaaaattctgaaaaatgagtttgtatttagtggcccttggaccaagtctcactacattggaagacttgaaataatgccagaaggctaatcttcaaacttcagagaccactgggggctgttggtcactgtggcacacagacatttattattaaaataccctgaaatctgagttttaaaaaatgccttctcaagaaccacctcctccccgagggaatcactgagtgggtaggggctgttttaaacaaagtttttcccccacctgcatcaattaatctaaagctgttgggaagtataggtggaagactagcgctctaaaagcggcgggcggcgtggagcctgccgggagctgtagtactcaacgcggc

SEQ ID NO: 54000 - DNA, 310 bp, Mus musculus
  source 1..310: mol_type = other DNA
aaggaatgtcttagtcaatctggctatttttttaaatggttattcaaaaagaagaatcagtggctatagattataacaacctattgtgtttttaaatagaactagaaggttaattactatgatttgatctttatgcattgtatacatggatttaattgtcacactgtataactatgtaaaatagtttcctatcgaaatatcaatagttcccagtctttgtacacactaggtgggagcagctgggacttctgcctccagcctgcattgagggggcggagctgagcagctgaaggctgcacggacccggagc

SEQ ID NO: 54001 - DNA, 302 bp, Mus musculus
  source 1..302: mol_type = other DNA
cctcatactctatattaaaaataatgtcacagtagttggcatagcacacgcttgtaggatcctctactgaaaattaaatttcagggacgttcaatgaaccggtcaatgtttcaaagcctgagagagcctgtccttacaaaaggacagcttagggtaacgtttccgcggcagcttcctttttaagtagctgaataaacatcattaccatctttgaagcacgaaagataaaggcttctaaatcctttaaaggagaatctgagcttgatctaatgaatatgtaaattaaacataattggcagcca

SEQ ID NO: 54002 - DNA, 497 bp, Mus musculus
  source 1..497: mol_type = other DNA
gtgtatgttgtgggaatcatatactgaaagcagctaacaggttaaaagcaaccttatatgagaactattccataaatgttggacatagattgataactcagtaaaggaacttcttccattgcaaaactcaaatttctgtagaaaagaattaccatgttttctgtgctgttaattacagagcaaacattgggctcactatgcaatgttgtacactccaacatttgctgtatttacaactgtttcctcatttggaaaaatcgttctatttattggaatgtaaaatattcctctttgactctgagataagtgtcttggagaccagacagagatttctcaattctgcacatttttgatgattgcacatttttaggcgggtgcactcacctatgcatgctggaggccggaggatgacgtcaggtgtcttcccctagtgccttctacactaggccactctgacttctgacgctggagttgcagaggactgcaactgcgcagga

SEQ ID NO: 54003 - DNA, 240 bp, Mus musculus
  source 1..240: mol_type = other DNA
tgaatactcagcagtgagtagcccttctgaatgcctacattttaggagatgaagttacagttgtgtgctcatcagactgtttctcttttgtgacttgctcatagaaacctgcctcggtaaccgtttctgaggccagagcccttctccaaatccggcgcgtatttgcggcctctctccgggaagctgcactgcgcagtcgcagaggaggcctcaggccccggcacttcgcgcccagggctc

SEQ ID NO: 54004 - DNA, 400 bp, Mus musculus
  source 1..400: mol_type = other DNA
tccccaagcacagctcaactatggaggtgagctgtgaaaatcttgcctcatgagttctagagggaaattcctgtaccagcaaagatttcttctccaaggtagcacagctctgaggtaaatctgaggtgttcattcctgatgatggatgacatatattaaacattgacagctacatctatgatactcttacagtgttactgtttccccaataagccagatgggttatgaagatcgatttctgtccccttcccagctgtcagaattgaaccactggccccgtgtttcttcagaggaaaacagtggagtggaggccctgctgggcggtgcctgcaccgccggctgggctctagccccgcccctttcccgtgagcccacggggagtggtcgggccacgggcggc

SEQ ID NO: 54005 - DNA, 597 bp, Mus musculus
  source 1..597: mol_type = other DNA
cttttataccatgcaaggcttagattaaatgtgtgcacaactgtgctgtatctacagcatttggcacagtactgggcacaggagtcagtcactatgtgaatgatggaaagccctctgaataaaggctcttttcgctgtactgggctgtgcaggtcagcgaggcccctggagaggctagaggctggccgtggctgcctgcagtgactcgtgactccccagcagccagcgaaggcctgagcccgcgagggaggggggcggtgggcgcccctggcccgccctccgcgtgcccttcggacgcttgcagggggtgctccgggaagccgcgccaccgcgggctcgcggccacctctcgcgcgcactgtgcgcgcctagccagcggcttggcctctcccgaggcggggcccacgcagccgcgcccccttcccgcgcttgcccgactgggctcccgcgcgcgagcgcgatctgcccgcaccgcagcccctcgcaccacgggcagagcccaggcggacgcgcgctccgccctacccctccccgccccgagtgggctgcgcccgcccccgctcccgcccccgcccccgcccccgcgccctacatcca

SEQ ID NO: 54006 - DNA, 617 bp, Mus musculus
  source 1..617: mol_type = other DNA
gaatgatggaaagccctctgaataaaggctcttttcgctgtactgggctgtgcaggtcagcgaggcccctggagaggctagaggctggccgtggctgcctgcagtgactcgtgactccccagcagccagcgaaggcctgagcccgcgagggaggggggcggtgggcgcccctggcccgccctccgcgtgcccttcggacgcttgcagggggtgctccgggaagccgcgccaccgcgggctcgcggccacctctcgcgcgcactgtgcgcgcctagccagcggcttggcctctcccgaggcggggcccacgcagccgcgcccccttcccgcgcttgcccgactgggctcccgcgcgcgagcgcgatctgcccgcaccgcagcccctcgcaccacgggcagagcccaggcggacgcgcgctccgccctacccctccccgccccgagtgggctgcgcccgcccccgctcccgcccccgcccccgcccccgcgccctacatccaccgcccggccgagggggctcagtcctgtgctgccgctgtcgccgctgcgctttggtctcggagctggcagcggccgccggtgccgcctagacagctgcgcgggttgcgcacgcctcc

SEQ ID NO: 54007 - DNA, 397 bp, Mus musculus
  source 1..397: mol_type = other DNA
cctgtttctcttagagtgtcttgaggtcctttgaggcttttcttagaaccggttactatatgtatgatgattgatatctttattcatgtttttatcattggcaaagattgacagtcctatccaggaagacattaaatgtctataatgccttaaggctctcactgtaatgttttcctttaattacactggtagcaaaagtccatctcctattgttactttcatcattagcaggacaaatatgcattatttataggtccaaaggctcctgtggcatataaagtaaattaataaggatggctcagcattaagctatgtcagagctgagtccaattttattccgggaagctaatttggatgctgagtagccccacaggtacctaaaatggttaagaatttt

SEQ ID NO: 54008 - DNA, 244 bp, Mus musculus
  source 1..244: mol_type = other DNA
acctaatgaaatttcctcatctaagatgaagtatttcaatactgtcacttactgtgacttcctaggactaataagttttacttcggtttacatatcacttgaagactcagagaaaagaggtgacacatcattggaatgttgcagcattcatgggaagtgcggggactacccgagccccgccctgccccgccccccggggtcccagccccggcagaggccaaagaagaggcggcgcctgcgcctt

SEQ ID NO: 54009 - DNA, 592 bp, Mus musculus
  source 1..592: mol_type = other DNA
gcttgcaggcaaaagctcctctcacctacagcagccagagcctccaaacagcatgttatgtgtttgggttactaaatcctcggctccagtgcaggggcggggatttgcgggcgccaaggtttcgcgaagcgggagaaacttgtcccacgggcgcctgccgcaaagcccattccgaacgaggtgccatgcatttcggcaggctgcgtccctaaacacgcggcggcagccgggctccgaggccccgccccctggccgcgcaagcgtcgcggacctttgacgtcccgtgggcgggtcggcgcgacccgctacgttgccacccgcgcggacaatggcgactgcatcagcctgagggggacttcgctctcaactcgttgcctgggcggggaggaagctgtggcgcctccggaaccggccgcagcggtgacagcgcgcctgcgcgcttccgcctcgccctggccccagcagcggcggcggcgaggccctgcggagcccgccaggtgggtggcagcgacagcgctgaccatttgttggcgcaggcgtgcagggcggagtctgggcggtgcctcgcagacttcccagggtctgctggggc

SEQ ID NO: 54010 - DNA, 294 bp, Mus musculus
  source 1..294: mol_type = other DNA
gaggccagcctggtctacagagtgagttccaggacagccaggagcaacctagtaactataaaggtcatggggattttcttcgtgctcaggtgggaacccttgaacactatagctctgaaagcactttggctttttgtagatacttcagagatactcccatgtttttacaaaagtggatccatgggaacaccctaaactagtgaaaatactttattgacataataatatatctactagataaccctacatcttttaatataataaaagtttgctgtctctagtgtttctttaatc

SEQ ID NO: 54011 - DNA, 434 bp, Mus musculus
  source 1..434: mol_type = other DNA
atagggataactatatatcttctccaaaacctatgggttaggcaaagccctttgtgtagtttctcagctgaagctcagttttcatatccttagctacatatcagtatagtggactacatcttatttaataaatgtggagccctttttcttatgactagtaaagctagaaagattttattgcctttaactttataccaggttccagatttatgttagtaagattgaaattgaaataagtttattactagtggactcattaaataggaaaaatactgccattgtcttttaagaagtctgacatttcaaggcaagaatgaatgtatggaagaagaaacccgtttcttctttactaacaaaagaagaaaagaaaagaaaaaccctttacgtaactttttttgctgggaaagactacgaagcacattttccaggaagtc

SEQ ID NO: 54012 - DNA, 248 bp, Mus musculus
  source 1..248: mol_type = other DNA
aggcactggcgacagcgatatcagtttctaatggccttcagcagaactggattttttcggaatttcagagagcatcagtactttcagatctctgaattcacatttctaaagagtcagtagggcctacagtttaacaagtccagactggttttaatttaccatataaacatgcttagcaaacccttagctttggaaggtgataagggatgctacttaacttcccactgactgctgcttctgtcacaatc

SEQ ID NO: 54013 - DNA, 332 bp, Mus musculus
  source 1..332: mol_type = other DNA
catatcgtaatatggggaatatattttaaaaccaacattttattttacattgaaaacaatggtgctggccaagcctggcaacaaagatagagaatatatcaataggtatttgacactttcagtaaggagagcctatcagattgtaaactagcttgacctggaacccactctgtagcccaggctggcctaaatgatgtgacccatcttgcttggccaaaaaaggcctggcgtatctagacagttctgcaatgtggcattgggatcctaagcagctaagcagaaagcctcacctccttatttgtaggcttctgaggcctgaacccctgcacaca

SEQ ID NO: 54014 - DNA, 305 bp, Mus musculus
  source 1..305: mol_type = other DNA
aggctggcctgcaactcagaagcttaaaaaacctttatagaagttggataatgttccactcaatttaactagtagggagactaaccaataatgaacactgtagcacctccctgagtctcatccctctactaactagtaatagctagtccttgactctagcattttagggttttggcaaagaccctgggcgggtggcaacagcatgcgcagtgtagctgcagccctggggtgctgaggcagctgctgccaccaccgccacaaccactgccgctgctgctgttgctgctgctgctgctgctgctctg

SEQ ID NO: 54015 - DNA, 483 bp, Mus musculus
  source 1..483: mol_type = other DNA
aattgttatttttctttcacaagcagataaaaatttagaatggtctggtagctcatgcctgtaattccagcacttggaaatctgaggcaggatcagagctgtgaattccctcagcctgactattaagaatgctcacttaaagttcaagcatgcttggtagcatggtttggtgtttgagacagactctaacaaagccagtctgtgctcttaaccccgaggcacctgactctggtctcacttgcacagaaatcaagtaggtactcagtaatcgttctatatgaatgatatttttgtaatgtcacacttattaacagattcttccaatgtattacttattgctcaagaaaatttagccagttattgagtatcaacgaaacttctttgacattgcttttggaattaggattttcatgcaaaagtaaaagttttgcgccttgtttgacctaataggttgctcaataaatttacttctctagtcaataa

SEQ ID NO: 54016 - DNA, 272 bp, Mus musculus
  source 1..272: mol_type = other DNA
tccatttaaaaaaacattatttatttattttattttatttattattacttttcttctgaacaggtggggggacttagctacctagtttgcctcagtcatcagaattctggagtataatactgttaagagtattttctttttacagtttaattacatttatttattaatttttgtcttaggaaaaaaaactctcaccctcccccacgcccctgtgaggcagttggataaggcctgttgacttcctcagctgccaggtgtcctagcaacgcggt

SEQ ID NO: 54017 - DNA, 521 bp, Mus musculus
  source 1..521: mol_type = other DNA
ccttcccaaatgctcccttatcctgggaaggtagggcttggagagcatgaacccgttttcaaaagagcagaacgttttagttcatcaaataagtgtgctattcacttgaactgcttctggaaataatagcccttccattctgcttcatctgaaaacagaggaagatgaatagtctggataaattatccagcttgtctaagacaaaatcaaagccgtgattcctttctaagaactgagggcagcccatagaatgccagtggcagtgaccctgtctaaaatccaggggctaggcgctaggggctagaagctagagtatacatgaaaattcaccctggtgacaactccagtctgtgagcatcagagtgcctgcagttggatgcagggtgacagaatctgtgtgggtccatcgcgagtcatcctcagcctagctcctctgggttcgggcctcgtgcgtcaccagcgcaggcggggaggggaggggggcgcctcaaggtgagggcaccgcgctgccttaagaagcc

SEQ ID NO: 54018 - DNA, 390 bp, Mus musculus
  source 1..390: mol_type = other DNA
tagcatctatgctaatcacggtcacagtctgactccgaattataatctaggaacacagatttgccccactcatgcgggaatttgttctcggtacctacggaaggaaaacgttccccagtgggtaccttcttgggtcaaagagtttctgccggcttagagcagggccaagccagggagaggctcagctctgtcccgccgcttgcggaagcctggccccagttccccactttcagggacgctgagcagcggctgcctcacctgccgggcgctccgcagctacccaatcagctggggtcgcccggcagcggctgccatggtggccaatgggcgacagggccgggggtcaggtgatctcaggccagctggctccccattggtgcgcgctgccca

SEQ ID NO: 54019 - DNA, 539 bp, Mus musculus
  source 1..539: mol_type = other DNA
taatcaggaacacagatttgccccactcatgcgggaatttgttctcggtacctacggaaggaaaacgttccccagtgggtaccttcttgggtcaaagagtttctgccggcttagagcagggccaagccagggagaggctcagctctgtcccgccgcttgcggaagcctggccccagttccccactttcagggacgctgagcagcggctgcctcacctgccgggcgctccgcagctacccaatcagctggggtcgcccggcagcggctgccatggtggccaatgggcgacagggccgggggtcaggtgatctcaggccagctggctccccattggtgcgcgctgcccaagtgattgactttatcagtccaaggacattactctggaggaagaggcttggactcgcgaagcgagcagtgaggttcgagcctgcttactgcaggctgcctgccctctgcagttgctcctgaaagccgggacccgaggagcctctggccccgtggttccgcgggtgtccgggacaggattgacaaaccccgcc

SEQ ID NO: 54020 - DNA, 249 bp, Mus musculus
  source 1..249: mol_type = other DNA
aatagagtattttttaaaatagtcaccatgtttattagtagtgacatttaacgcttttgatttataaattgctattttaaaggaattaagatacaagtaatgttccttttgcatttgcatattatatgttggtcctatgagtgtgtgtgtgtgtgtgtgtaggaataccctcatagaaacaggtcaaacagaacaaaaaagacctctttttttccccctctgtgacgtatgtagtgacttccgtatagt

SEQ ID NO: 54021 - DNA, 441 bp, Mus musculus
  source 1..441: mol_type = other DNA
tggtgtgctggagcagctctgcagtgcctgctgctgccgctatagtgggggctgaaaaatatctccgtttctccctaagcctcttttagggaaaaggaaagagggctctgcacccggggggtggggggaggggccgccgagacagggagggggcctccgccaggctgtcgcgctcttctggagggtgcctgcagccctgtgctgcgacggtgccgcgcccagagcagcagccacagctgcgggaaagctggcaccggccaacttttgccggtagcgccggaggggccagggcgagggcgcgctcccccgtgcgctgcctcctccctcctcgcgcccgccgcccgcgcccgcggcctctctcccgcccgcgcgtcctccggccccctccacgcgacacagggcgggggtgccgcgaaactccgacccgagccgcttggactt

SEQ ID NO: 54022 - DNA, 656 bp, Mus musculus
  source 1..656: mol_type = other DNA
aattcttcaatattcattgatagtgacaatattcagaacttgagacagatttcctttctttctgactcaagggaagttttctgttcaatagaaaagactcatttgtacatttccattcatttgcatttttaaccaaaatagtgggcaaaaatttaaaaaaggatggtgatttcatttatggtcttgcctttccttaaaataattgtttctgtaaatctttaacaaaagactttgatatgaaaatgttttgttttatgcaaaaaactaaaagttgagatggaatttcaaccttttacacacaatgttcaaaagcctgagcaactggaattcttgcaaatgttttgcttgtagcattttctattcatcaataattcaatttcaaaataaaagatggaggagaagcatctaccaaatgaggtagcttagttccatttttgtaattcgagaaggcaaaataaaattttatgcttggaaataataagtttaagcaaatagtatgggccaagcttatatctgcgtccaagcaatggtcttactgccagaacgatactgctacacgatgaatcattaatgatctgtgagagtcataatggtctgtcactaatgcccattaatgatctcatgtttctggccagtaccttgggaatatttagata

SEQ ID NO: 54023 - DNA, 286 bp, Mus musculus
  source 1..286: mol_type = other DNA
gggttgagggctctgtgaactaagccatgccctacccatcggtccgcactgacagaaaggacagtgtgaggggaaaggtttgcaaacatccaggcactgattgcgttacaagtgtaaaggttggctaacctgactggcttcgttgttcacagcggatcaagagacctgctgtggggctgccaggcttttgcaaggcggcagctgacgtctgcgcgcccctgccgagctctgacagccggcaggcggctttgtggggccccgccctcgccggctgcccccccccgcc

SEQ ID NO: 54024 - DNA, 438 bp, Mus musculus
  source 1..438: mol_type = other DNA
atatccattaagagctttcagagtattaagacatcttatttattaagcttccaaaatatgtacagtagaggtactgtgtactgttcccaattacagataaggaaactgagttttttttcaggttaaattaatggtgaataattttaaaaatatgacaagtcacaggctgatacatagttactattctaaacattatatataaatatatataagaaattaacataatagaccaaataaaaggattcacttgttatctttaaactctacagataaacttacctggcagcacaattgtagctctgctccagtggcagcagctcatgaaaccagagtgcactgggtttatctgtaaagccctggctgtcctggaactcactttgtagaccaggctggcctcgaactcagaaatctgcctgcctcgataatttacatttcaaa

SEQ ID NO: 54025 - DNA, 404 bp, Mus musculus
  source 1..404: mol_type = other DNA
tccatgtggtacacagatttatactcaggctcacatatatgcataaaataaaataaatattaaaaaataattgtggccctggtggtgtatacctttaggcagatctctgagttcgtggccagccctgtatacagagcaagaaaaaaattaaaattttgtatgtaccaatgggacaaaatgtgctttcactttcacatacatatacattgggtaatgatgtgactatcacatttaaacatttattatatttctttgtggtaagaacattcaaaatgctctcttttttaactatattgaatcttctccatcttaaaactagattattatcaggattcaactttacaaactgtaacctttctcaatgcttaaatccagaatcttgaatagtccagcacaagctaatc

SEQ ID NO: 54026 - DNA, 298 bp, Mus musculus
  source 1..298: mol_type = other DNA
atgagcagctagctttccttactcttccaaagctttcttctggggagcttttaggagaagggattggctgggacctcccatcctaccaactgatctgtatgttcagattctttttgtgcataacatatgtattacagcttatgtgggatcagttctcttattatataatcctttcctttttaaagcaagtcaggagagctccagcccttccagggcaggtccagctcccactgcctagagtgagaggtcgggcggtgtagtgggggaaactaggcggggacgtgggtgtacatccact

SEQ ID NO: 54027 - DNA, 640 bp, Mus musculus
  source 1..640: mol_type = other DNA
cttggactacaactcccagggtgccccaggaggcagggaaatcccgccccgctcggcttaggtgggacccaagagggacgcctggagggggcggcttttgtaactactccagccgcccgcgccgcgcccgcccgcccgcgccagggtcccccggctcgtcccgagtcgtccctcagagagcggccactcccgggcaggaagcgggcacgcctggaagcctcgaggcgggccgcaccgaggctctcctcagccagaagtgctgggcggggggtgagggagaccgtggctcctcacagacccctgggagtcctgccaggcgaggcgcggggacgcccgagacgggcgaccgctgaagcgggcgagtggggactcggccgggggcttagcggcaggacgagcgtgaggcgcggggtgccgaggcgggcgctgacggggagccaggctgagcagcggccggtccgccatccctcccccgcgcgccgggctcgctgcgaggcgggctgcggcgggagcgcggggcggtgctgggggagcgacggggccgccgcccccgaggcgggcgggccggggctgggggcgggtcgcggggagggcggggcggggcggggcggcgagcgcgcgggcgggcgggcggttgggc

SEQ ID NO: 54028 - DNA, 528 bp, Mus musculus
  source 1..528: mol_type = other DNA
gaacattttctcgcaccagacactgagatggaagcttgcaaatcagaagttcagtggatttctgaaaaagcacctgctttaaagaagtgccacagtaccaggcccgtaacgatgaggtttcttcacccctccagaagggggcgcacccttgcaagcgtctccttcagctggagctcagcaagcaattgttaaaaccccttttaaaaaataaaagagaacaaaaattattccatagtcttctggctttatacaaactaagcagattgtacatatatatatatatacatataatcacaaatgctgagttctgagtagagattttccaagcattttcttcaaaatgaatccgcccttacaataatttgaagagagagaatagcctaactttaaaataaatctgagtaaaagaagaaataataataacttatagtgtgttactgctcattccatagccctgaatatatataaaacctttactagaaagtctattcgtagatgggtcagtgtacatgcacaggcatacgcacc

SEQ ID NO: 54029 - DNA, 763 bp, Mus musculus
  source 1..763: mol_type = other DNA
aagtctttctcagagaccttcaagtcttcctcagagacaaggttcctcactgggcatctggggaaactctaagaggacgagaaaggagcagttaccttttctccctcgacaaaatactgaccgaattatgccacgtgtttcttctaagtgtagaagccaaagggtccatatcgcctgtctagttcggggctgtaaaatttcaccagctcatttggaagaagctgacaagtccacccaaaaaatattgtgtgcaaaggggccccccgcgccggtcgagcgcggcgtggagggagctctgcagcgggccacctccgagccctcagtgcggcaggcgcggcgctagcgagtgccggggcggattggccggctctggcctggcccgcggaggcggggaggccgctgtgccgcgagccagcgagcggccggcggggaacagcgcgagcccggaagcgggagcgcaggggcgccggcggcgctggagttctggccggcgggccgcggaggctgcagccgggggccgggccgggtcgggccggcggggcggggcggggcgggaccagagctccgggcggcgctcgctcgcttgctcgctcgctcgcccgagcggtcggagtctcggctcccgcgcccgcccgcccgccgaggggcgcccgtgaaggtggcggcggacgcggggcggccccgaggctgaggcggaggcggaggctgaagccgcagcgggcacagtcggcggccgagaccccaggggaggggggcgcgcggc

SEQ ID NO: 54030 - DNA, 440 bp, Mus musculus
  source 1..440: mol_type = other DNA
ttgccatgaaaacggattttccaaggggcccgaccctccccctcaggagcatccagagcgaaaaagtgaaggctcgttcgcccttcccaggagctacgttcgagcgcctcccccgggcacaggccgaggcccaggtgcgctagcagtcccgctccgcccctctctcggtcctgcacgcagtggccctcggggtggagggttcaggcaaccggctaccatcaattccaaggaaggcttctcagtggctcctggactgctaccaggtctgctcaaactttttgagaccctaattggtggtctcagagcgggtctcgtcgacagggggctcggtgttgattggccaggactcatcacggcgagcctgtcaatcacgaggcccacgggtggtgagggggcggaccgagccccaaccctcccggatctgagcaggtatataaggg

SEQ ID NO: 54031 - DNA, 266 bp, Mus musculus
  source 1..266: mol_type = other DNA
tttgcaaatcttgttaacaaaattgcttgtcaaagagaagtcttttgttgcatactatttatttatttaatgaaagtgagtctagtcggacccatggctccagacgcatatttgaaatgtgcctgcagaaaagtttcagctggagcaggccagccctgagggctgagcatctgttctccaccttcctacttccaggtggaagaactggcgggaccccgcagcgaagctcctgggttaccgcactgcgctagcgcacaggtttgtaa

SEQ ID NO: 54032 - DNA, 504 bp, Mus musculus
  source 1..504: mol_type = other DNA
atcagctgtttcttcagtaaattggtttgtattggtgataaatactatttagaaaccaatatctgaaaagtagtaaaaaatattaaactaaattgtcaggaatttccttcctttgtgtaatattttaaatagtcattcttaaatgtacagatttttaaaaacaaaagtgaaaaaagtaaggtactgagatgtgcacatttatatcttcatgttaaaaagctaaatatattatttaacttctttccttatttgcaatcttaagacaaatttgcttatgaatgttatttaaagttaattctagtattttataacctatttggattattagattggaactatattcttgagccagggtgtttgtaccataattttttctgtaaatggcttcttactgaatagaatgtatattaagcagcagaataatagtgatcctcagcaaagcccatgatgttgtgggggttccactggaaattaaggtaatttaagtatgttctgtaccagaag

SEQ ID NO: 54033 - DNA, 253 bp, Mus musculus
  source 1..253: mol_type = other DNA
cactgttttctgaattcctttcagaaattctggctacaaatttggactagaagcctctttaaacaccagtgtagagagtaccaagttccctgggtcagtgtagttatccctggagccaccaaacccgataaggattgtaatctctacagaggagctcaagttctctttttgagaatctacgtggagatagactctagttctcagagggtgactgcagtactatttcgtttccccctcctcatttttcagaggt

SEQ ID NO: 54034 - DNA, 432 bp, Mus musculus
  source 1..432: mol_type = other DNA
agaagttcagtatcaaatttggatgaaagaatttgtttccccgaattccatatggggaatccaaggaagatgaacattttcaggtctgcaaatgaagctgtcctagcactgggaagggtcctggaaggaaatcccccaaccagtacagaaatagatgactgtgattcttaaaaacattgttgccataaattcaatatccaggaaagtcctaatctgcttgaaggaaggttgcaagtctaaacattgtttctacaacttcagtattaggattgaagttttttttttttttaactttttaaaaatatttttattagatattttcttcatttacatttcaaatgctctagaagagcctaaaactggtttcggactaggttcatccttgagcctcaaaggacagcagagctctgccttcaaactcgctcgctcaga

SEQ ID NO: 54035 - DNA, 291 bp, Mus musculus
  source 1..291: mol_type = other DNA
aacagtgtctcattcagtaatataaaatgataaggctttttgtgattgaaagaacgtggaatgtccccgggcatttttcccctccctctgtcatttaggcacagtgataactggcaaaaaggaaagttccagaatttcagctgtttttttcagctctgcaattgtactggagcaccagaatcctagctgtgcaggcccagggaatgcccagtgactcttggggcataatatgacagaaagaaaagtctttagtttagactgattctttcctgaccaatgaggagagatggt

SEQ ID NO: 54036 - DNA, 403 bp, Mus musculus
  source 1..403: mol_type = other DNA
aactatggggtaagacatctctcttctccataaaagaagctacactttgaagcttgaatatgaacacaactgatgtgtaacaaggtgatggatatcctatagagaaaaaaagttaattgtcttcaagatataagatgaagctcattttcagcatgatttaacatgatgtacattaactttacaaattttgagaaagacatccaaactactagataataatgaggatgaatatatagcaccatgttccatacaataagggttgccctaggaaaggtttgaaggtatcccccttcttttcatgtgtgtaatgaaaacttaaagagctatatagttcagtgttcactgaccacgcacacccatgaatgtgtcagctataagcgtgtctgtgatattggttaccaac

SEQ ID NO: 54037 - DNA, 256 bp, Mus musculus
  source 1..256: mol_type = other DNA
catctagagtctgcatggatcagttctgatgcctggagagccctggatgcatacttggtcctagaattaataccactattttgcagactgcatattgagatgaaattcaagtggactttagagatgaccccagatcatgtatgtgatcatcactggagatctcacactgaggtagatgagacatgtctcaggctgacttctcctgagagctttaaggatctgggtacccaaaaaagtgttccctgaactgtttttt

SEQ ID NO: 54038 - DNA, 425 bp, Mus musculus
  source 1..425: mol_type = other DNA
aaacctgttgagggtcctgcaccaaagtgactggtgtctgagaagaaacagccacttgtttttgtgcctacattctcatcagaggattttggaatgttctaaccattgtttgagttgtcctaaatttgaggaaaacctcagttctagtaacatgggagcctccatcccacctttccacatctggggatttaaagttgacaaacagtaaaatgggacccttctacttctatccactctggacagaggatccctttcctctccttccctcaggggatggggagattctgctccccagctttctgagtgcaaaccttaataaccaagatacttgtgtccttttgagggtctcacataaccgcatcaacatccagggacttggatgactcagcgacctttagtgatgtccctagattcctcaattttaa

SEQ ID NO: 54039 - DNA, 216 bp, Mus musculus
  source 1..216: mol_type = other DNA
aaataagctcactttgggctaaagcctaacacttttgccttttaagcttcaggccccgactggcgcaattcaatgtcattgctggaattattcaagtccaccatctagactaaaaaaaaaatccatctccctggggttcttgcttgttctgtgtgtgtgtgtgtgtgttcgcgcgcgcacgcgagcgcgcgccccttttcttgtctcctccctagg

SEQ ID NO: 54040 - DNA, 517 bp, Mus musculus
  source 1..517: mol_type = other DNA
ccccctacagatttgtagcagacaataaaatactgaaaaacaaaaaatatataataaattattatcttggtcattttaattgttaatatttattgtagaataaataagatatgcttcaatatattccctggaacaaaaagcactgatttatattcagaatatgatctgagtattagtctaaagaccctggagaaaaagtccaattgaactatgtgctgttgcttcattgtttcaagaaagacataaacaggcttcctttaatcttctcaaagagataaagagagaatctccccctgtgttgctttttgcttagtaatactatgatcccaatatctaatattttataatctaaaaaacacagtgttttataatcacttcatttgtatcaaagagtggtaaaagatctatgctctctgaagagactttaattctcatgaaattctcctgcactgtgaccctcacaatggggccctttgtttgaaagggcggagctcccactcacttagcaacagttgag

SEQ ID NO: 54041 - DNA, 249 bp, Mus musculus
  source 1..249: mol_type = other DNA
tgaaccaattaagcagctgcaatgtcttcctttaatagaatcagtctagactactaataatctttgaagtataataatcactattaaggagagcagtgctctgcaacgcttgtcagacagcgagtgcacagcaggctagagaggggcagccatccttccctccctctccttgccagaagcgctgctgggtagcgagctgctccagtaaggatcttcctaccctggggtgggtgggtggggggataccgc

SEQ ID NO: 54042 - DNA, 292 bp, Mus musculus
  source 1..292: mol_type = other DNA
gggagaggatcccagcccttgcagcctaggcagagcctcagcctggcaatatctggcaggcaaatagctgtttggctggtcatcaccaaggaagtaattccctaactgaaacagagctttctccgtaaagttcctgggaggctctggacccctccttgggagtctgccattaatggccaagtcatcactagaactggtcctgttcagaaggagcttctcttgcagccagccgggctggagatagagcaaagctttcactcacagggaagggaagcgtctgccccaccctccc

SEQ ID NO: 54043 - DNA, 580 bp, Mus musculus
  source 1..580: mol_type = other DNA
aaaatatatttctagagtttataagtagaggtcagttaataaattctaaactctatggagtacagtgataaaattactaagagtgagtcatttaattgtacatttagaagaaaaatagaacatgtgtttctttcctaggcccatgacttagattcttgaccccaggatatgggctattaattagttacttgcattgcatttgtgccactatttcagagtaactttcagtaccatgaatgctgattagtagaggtgctgattcttcaataatatcaccttatgaagagtttttgcaatttacaaaatatttacaaaagcctaagttgtttgctggaggaaaccatttggctaatgatccaactagatataaacagttcatcactgcatgtttcacttggtggtgaaaggtgtgactctattttgatttctcatatatattaaaagaaacttctatagtagaaggcctttacttggcccttaatggctataattagaggtttgaaagactgtttatgaatgtgtgaacatttcattacaggctttgtatgcaatgccctatttagaatggcgctgattgatc

SEQ ID NO: 54044 - DNA, 440 bp, Mus musculus
  source 1..440: mol_type = other DNA
agttgagctgaagttgaactgcaatgttggacttgggcaaactttatatgccccagtggaaaatacctaataaaaaaattttaaaaagaatatattattaaccatgaagaaggacttctgctacataatttatgatggttttcttgaaagtatgaagtcaaatgaccatgacttgaaatctctgagctcaaagtaattctcccaattttatttcagtcagctatatacttataagtaaataaaagaagtaaatgcacttaatgtgttatagaagcaacccctctgaaaagaagcttttatgttcaaactgacccttttttccctcccaacatctccttaattcagaggtgtaaagggcattgtgatgtcagagcctaaggttgccatgattggctatgacagatgtagctgacatagtttatgggtatccattgaaggca

SEQ ID NO: 54045 - DNA, 313 bp, Mus musculus
  source 1..313: mol_type = other DNA
tacttaggacagtgcttggcacatggtaggcattcaatgaacttctcagttggatgcaagatgccctccctctggtacagggggcatgtaaggaattaacaagtgttcaactctctctgtcagctctttttattacgaattccaagtaaaactatgaaccctgaagttcaatcactaggtagtagagcgatttattcggaagaggcctctagtccccgcggcgggcacaggcagccgcgcgcgccaaagggtgcgccctgataccctgaggcaggtacccaggagggcgcatgcgcgtgctccactgcccgag

SEQ ID NO: 54046 - DNA, 303 bp, Mus musculus
  source 1..303: mol_type = other DNA
gatgccctccctctggtacagggggcatgtaaggaattaacaagtgttcaactctctctgtcagctctttttattacgaattccaagtaaaactatgaaccctgaagttcaatcactaggtagtagagcgatttattcggaagaggcctctagtccccgcggcgggcacaggcagccgcgcgcgccaaagggtgcgccctgataccctgaggcaggtacccaggagggcgcatgcgcgtgctccactgcccgagagcggagcccttggcctcagtcagttgaggggccgcgcctgagagggga

SEQ ID NO: 54047 - DNA, 131 bp, Mus musculus
  source 1..131: mol_type = other DNA
ggaaaattcccaatgcagagagacaccactgactggcacaccctcgctttgccctgtctccctcctaaattcacgtggggaaatgagaacccccacccacggggctagactaggtaggggcgtggcttcct

SEQ ID NO: 54048 - DNA, 467 bp, Mus musculus
  source 1..467: mol_type = other DNA
ttgggaaaggatctttacctattctaaatcagataggggactagttcaacatccttaaggtgggattgcaggcttgtacaaccactctggaaatctctggttcctagttgggcatatatccagaagataagaaactgatatcttaagttcattgaattttaaataattaaaaagtatgtttagaaaaccacttttggctaatgtttactacatgtgactatttatagtgactgtaacaactacaagaggaattagaagcctgatgaaatttattttacttatttatttttgttgatatacaatacgtagcaatgcttctagtatatatactgtaaaactgcatgtattaagtaaacatttatacacatgaataatgtcattacagaaaaatgtcatcaataattagcctgttcttttttttttttatctcgcgagatcagcagctatcacgagagctcaaagttccc

SEQ ID NO: 54049 - DNA, 403 bp, Mus musculus
  source 1..403: mol_type = other DNA
ggaaacttttcctttgaggaactcgctaaaggaatggattcatcctttcctggacacccagcggttttcctgtttctcagagaaggaaaatgcaggaggtttttgcccaaagcttaaggttggaattgctgacctactgagggaccagtactacttcagcctaagaactcggctgggatgcgcagcaccgcagggcaatggcagcagggcgctagcccttccttgcagcagtttgtgcactcttttctgatggcaaatactacatcctctacactctggtacagtgaggtctgggtcccaggacctcctctgggtcctgggctaggtctaactgcccccatcagctgattttgacagggggtggggagcaagggcgggcggggctagcccctgccagattcgc

SEQ ID NO: 54050 - DNA, 414 bp, Mus musculus
  source 1..414: mol_type = other DNA
cattttttttgtatatgtgtataaaaaggagaaatataaaaacagcttttagtaactatttattgttttttcaagtaataattatgatgtcaactggtaaagcatgagttggcaaacattgtttaaattgttacgaagttttaaacttcaaaaaattgtgcaatatattatcactcaaataatactatcctaattaaaatgtaccagtaaattagaagcatatttataccctgcatttctgatatttcatgcatccacaagcactaaattttttgatcgttttttatttgaatgttaaatgaaatccctcttttttaaatttttaaattttttataagatattttctttatttgcatttcaaatgggcacattgggaaccctgtgctcagtccccacaggagagcgcattggca

SEQ ID NO: 54051 - DNA, 512 bp, Mus musculus
  source 1..512: mol_type = other DNA
catactaacaaagtattatgtcagttctttggatacaatgtgtttaagtccagcttagactacaaagcatgatcctgtatgacatcatgaaaatagtgtcttcaaaactatgaactcatagatcaagatgggtaagtagtcatccctatcaaagaagttatctaccattgacaacgtcttgcaaatgaaaaattagttttctccagggaagtctcactgcttaagggtaggcctcatgccacaaactcaatggtatatttatagatattctaatattatttgggcattttaaaaaagttatgtatgtgtgtgcgtgcgtgcattcatgtgtacatgtgtgtgtgcgtgcattcatgtgtgcacgtgttttcttttaaaagttattttatttatattttctaaaaagaaagagaaattgtttcagcatatattgtaggaaaagatttattttcaagaaaagcttgtaatggattgctaacaaagcctccgaaattaaaattctttctgaaaat

SEQ ID NO: 54052 - DNA, 452 bp, Mus musculus
  source 1..452: mol_type = other DNA
cagttttgatatgagtttaacatgttgcctagaagatgccacaatatcaatatttttgcaataacaaatacaaaactttcatcagtgtgcttgacatagaggatctagtttttcaaatttggtagaaagaagacatatccttcttggtcttcagtcaaaaatgagcagtagtgttcaacaatcacttcaccagtgaggtaaagtgatagtgactaaactctgagtttattttaagctcaatcagaacaggcactgagtatacatgcatgtatgtgtgagagggcacacacaagttgtggttgtgtgtgtgtgcatgcgcgtgcatgcattgagccaataaaagagatcctttttttgcaaagggcttctttggagaatgggctggaaagaaaggttctgcccaccttgactgctccacccccgacagggaggggacagaagagagttgcgca

SEQ ID NO: 54053 - DNA, 106 bp, Mus musculus
  source 1..106: mol_type = other DNA
cagactagtatctgtccatcatgttaagcagatctgtaagtgggaagattgctttaagaaaacggtgtcttctagcacttactgcttaattacgcaagtccgtacc

SEQ ID NO: 54054 - DNA, 337 bp, Mus musculus
  source 1..337: mol_type = other DNA
aagtctcagtcactcacctgtggtgaagggtgactgtctttttccttttagctaagcaagtagcaactttcctcagggtcattgaaccagtgggccgagaggaaaggcagtgccaattctattgtgctccccagaatcacaaaagtgtttagaataaagtatactcagtttgggtagagtcctctagcaacctatcttagctgagtagttcaggttcatgaaggaactggaaactattttggaaatctgctcaattttattcatgggccacattgtgacatcatgtgacaaacaaagaggatgatgacttcatcagatggttgccacactcctgatg

SEQ ID NO: 54055 - DNA, 248 bp, Mus musculus
  source 1..248: mol_type = other DNA
tctgaattttcttaaccagatagaaaagtatatatatatatttttttcgagacagggtttctccgccctggctgtcctgtcactttgtagaccaggctggcctcgaactcagggattaaaggcgtgcgccacacgcccggctgtatatttttttaaaacaaactcttttatagaggagaaaatcacaaacctggcaattctaaatacagattaggcattgatgatctcacttgcgcatcctagctacg

SEQ ID NO: 54056 - DNA, 334 bp, Mus musculus
  source 1..334: mol_type = other DNA
acgacttaagtctcagtcactcacctgtggtggagggtgactgtcttttggcatttgaatttccatagttccttttagctaagcaagtagcaactttcctcagggtcattgagagaggaaaggcagtgccaattctattgtgctccccagataatcacaaaagtgtttagaataaagtatactcagtttggtagagtcctctagcaacctatctttggactaatttcacacgttcatgaaggaactggaaactattttggaaatctgctcaattttattcatgggccacattgtgacatcatgtgacaaacaaagaggatgatgacttcatcag

SEQ ID NO: 54057 - DNA, 269 bp, Mus musculus
  source 1..269: mol_type = other DNA
aaggagaggagggagctggcagcactggtttcagcagcaagctctgctgatatttgagaaccaccaccaccactgtccttgtcgtcgtcgtcatcatcatcaccagcagggtggcacagtcaagtcaagccacttgactttgctggtaacagagaaaggaggctgtcactctgcctttccggcagggcagcgcagcttctcctttaagaccagagctgctcggaaactccaccttccgggcgcgcggcgcggagccgggcggtgggaat

SEQ ID NO: 54058 - DNA, 283 bp, Mus musculus
  source 1..283: mol_type = other DNA
acttatcacttataatatcggacacaaaattaagagacattattatgcatgttaaggtttctctgtgtagccctggctgtcctggactctgtagaccaggctggccttgaactcagaaatccgcctgctcaaaaagcagaagaaattttgacctgtttctttttactgggtattgtaccagaatcagtgatactttaatctagtatcgtagtgagccagtaagaaagtactgggactaaacttcgcactgcggaactgggaggagcctggagtcttccagggc

SEQ ID NO: 54059 - DNA, 381 bp, Mus musculus
  source 1..381: mol_type = other DNA
gcaaccacaggcaaaagctcttcttttttgtttgtgctgacctcttcttgatcctgtagccatgtacaaagccaatgaatgttctagatttatcagatattggcttgattttcataatgatgatttgcataacacgttaaatgttaaacttaacataaaaaaaaacaaaaaccaaaccatggaattgtttatattttaaagaagaaatgtttgtttgcaaagcttgccatgcatgaccaaacctcagaggttgtactggacccgcaggttcctgggcacagcaggtgggcggggaatccgtggtgggaccgtgtggctagggcgccacgcaccgccctcccgcaccgaccccgcctctcccgcccccgcgcgcgtggcctt

SEQ ID NO: 54060 - DNA, 213 bp, Mus musculus
  source 1..213: mol_type = other DNA
cagctgcagcccggagagaatatctgcattctcgccgccagggaggtggactccatttgacacaaacagacccgttcttttagttccggacaggtcctcaagacccaaggtcacaacctcttgcattcccatagcgacagcgggatgggaaggggcggcgcgcctcgccaccgccctccctggctgagctagtagtgccagctctgggcgggg

SEQ ID NO: 54061 - DNA, 246 bp, Mus musculus
  source 1..246: mol_type = other DNA
atatttagtgcaatggatagagagacagacagacagacacagaggggtgtgtgtgtgtgtgtgtgtgtttatgatggcatagacaggttccagctgcagcccggagagaatatctgcattctcgccgccagggaggtggactccatttgacacaaacagacccgttcttttagttccggacaggtcctcaagacccaaggtcacaacctcttgcattcccatagcgacagcgggatgggaaggggc

SEQ ID NO: 54062 - DNA, 316 bp, Mus musculus
  source 1..316: mol_type = other DNA
gcctcaggctgggttcccctgcaacaggtctgcagccagagtgcggctggtcagtcgcctgttcaactgttagttctccctgcttccttggcaagaaagctggggtctcagaggtgcagacctggggaccctgcatttcgctggggaaagagcttaaagggttactggcagccccctacaccttggggggctacatttcttttacaggtatttgtgttggagaaagagaactttagggactctgagctagtcacgaagcaaaggttcctgatggttaggggtggggctagccacccctcgaggctttaaaagctca

SEQ ID NO: 54063 - DNA, 477 bp, Mus musculus
  source 1..477: mol_type = other DNA
ctatcactgaaatactttttttagtcaccagatgattatcagggaacttgctcagaaaactgccgtttctcaaaaaaaattttttctgccacagcatcgagtatgcgcctgcagtcgggcccctgcagcatcatagctgggcacaggtggacctttggccatctccaaacggccagggggtttctcgggcagagcagctgagctcgacctcacttttctcatgccagaggccgaggcctgcgggaacctcggggccacctctccaaagtccttggagatgcacttcagctccgcgagggcggtgttggagagaaagacattattctgtgttttgccttcacagcaggcgaccgcgggttgttctgtttgaatgaatgagcccagaggccgcgcccaatgggcacgggcagctgcttcggagcccgctggccaatgcggctctgcagctagcgcgaggctggggagcgctgagccgcg

SEQ ID NO: 54064 - DNA, 395 bp, Mus musculus
  source 1..395: mol_type = other DNA
aagtcaaataatgtgatgttttagttgttgaagttcattagatttttagaactaacaaaacttgttctcagaatacccattattaagtttatgccctacctcatcatgtctggtggtatagatctggaatcccagccacctgggacctatgtcaaattttaaaaggatcaacatagacaataatttaggatttatggaacatgctacttatgttgcatctacccaatattaaagttgtagagacaatgcaaatgaatatgcatgactcagttccaaacgttctaattatgaatattaaaattcaaatggctttttttgacattttcttacccctcagaagagagaaaactttgactggctgcccagtgtgtcacgtggaacacccagtttgttaa

SEQ ID NO: 54065 - DNA, 162 bp, Mus musculus
  source 1..162: mol_type = other DNA
ttttgtgaaagctgattactgactttcctgggcaaaaaattgccttaagctttcaaacaagcttggctttaagacagttctgccgaggtgcacgggagagccagaggtcccaggtgaagttttcactcttcttcaaataaaaaacaaggtttgtacttttgt

SEQ ID NO: 54066 - DNA, 613 bp, Mus musculus
  source 1..613: mol_type = other DNA
atcaggattctccccatttctcagatttcgcaagagaaaagcctgacagaggtgcctcagaaggcggcctgggcctactgtcacgcgcccctctcttcttagcaggcacccaggccaggctggctggaagagcaggtgagcctgggtggggcccaggaggcaggtcggactctgcggctccaagacgcctggatcgcagggcttgcgccacgagtcacctctgggccaaggtggaggccaggggtccccagggagccccaagcccgccggccaggccccgcccctcagcagcacgggcgcagtcaggggcggcgccggcggagttgggcgcgggcgcgcagtgcttggtgcgcgccaccgcccctttggcccggaggcctggtgcgcggtgcagcgcgacaattgcggcctggctatcggggcaaggcggttttggcgctcgagagtggcacgccaggcgcggggcgcgaggccagagctggctcggcgggtctggcggagcccccacgaggtaatgggcaaggcctgtgcgcttggctgcgaggggcgggggctccaggcgctctttggctcgggcctggcgggcgatggggcgccaccgggggcttggccg

SEQ ID NO: 54067 - DNA, 396 bp, Mus musculus
  source 1..396: mol_type = other DNA
gactggctgcccagtgtgtcacgtggaacacccagtttgttaaaaacatacttttaacactaagtggaagtttgggtcaccactgtggaacagtcactctcagcaagggctttcagcgagagttctcactccttgctagattgccaaggcgggactgctcggttgcctagcaccgcagccgacagctggggggtcaccaggctcccgtgacaccgcatgcgcggaaagtcccggctcaacgtggagtggctaggctactcgcccggcctgctcctagagaatgatccgctggcagcgggacggacaccacgaaccccccgcgggtaagtcacgtgagtgcttgcagcgtacccgcgcccgcgcgcgctgcccgcgcgtcactacgccgcgccacgc

SEQ ID NO: 54068 - DNA, 179 bp, Mus musculus
  source 1..179: mol_type = other DNA
cagctttgaattggatccacacacactttggtcctgaagagagaagtaagcatctcacagcggcttccttagatttatctgctggaaacctcaaagaataaaatactacttagtctttcataaaacaaccacagatttttaagcctttgcagctctgtatccgcgtgctcagcactagg

SEQ ID NO: 54069 - DNA, 328 bp, Mus musculus
  source 1..328: mol_type = other DNA
aaataaataaataaataaataaataaataaataaataaataaatgtatttccaaggatctattctctggaatattctctaagaaaaaaaattgcctgattgtggagagacattttcgaaagcctcctgttccctagtcccatggaattggcctgtacaatggttcagatgcccacgcgcactccctgccagtggaggctccccagccctgggccccacccgccctggctgtctggcagcgccgcagtgctggcggctgggggccttggcgacagggctccctcatctccacctcgctgccgcagcgatcacgtcgtcggagaaggtgc

SEQ ID NO: 54070 - DNA, 499 bp, Mus musculus
  source 1..499: mol_type = other DNA
catggacccaggctgggtcacgggatagtgtgattttctcttccataacagaagcaccaggtaggggaaatgatccatgtgatagcacttgaactcaggtgcattattacagcaaggaatcataccttaggaagacttcattcagctggtgaatactcctgaatttgtttttctcgagaccctaaatttaaggaaaagaaatcctctgtggtcaaagttgtaaacttctaagatgttctaaaagaaactttccttcttcaaagaagaggccaggagccagaagtctggccatggctggacccaacccaggtgactagtgctggtcagggtaaagctgcagagacctgaagggcctgcggcctgactgcgcgcagcctgaggggcggcggggagggggccaagcgcgcgcgccttttttaccgctccttgcgcctgcgggattggctcagcaggtgctgccgtcggagtaggcggagccagccgcgcgccccgccctact

SEQ ID NO: 54071 - DNA, 324 bp, Mus musculus
  source 1..324: mol_type = other DNA
aaatctaaaaaagcatcatcaaaagctctttgagaaaccaattacagttatggatgatcaactgtataatgtacttaatacttatgcctaaatttggctaaatgtaaacttactaagataaaaattatgccggaaatcaaaccatttgctttaactgggtaggcctgagtttgacaagtctaagggaagcaatagaatggtcaccctgctgtttcctgaggcaaggcaagctgctggcggctgtactttcggaccggggacgccgcgtggggtccacccaccggttgttaaggcaacggcgtactcgcagcctcagcggcgttg

SEQ ID NO: 54072 - DNA, 160 bp, Mus musculus
  source 1..160: mol_type = other DNA
tctcagtttgagagactgatactgtgcccttaaagtccctaaactgattttctttgctttgagggacgtagaacatagaatctgtgcattttgatgagttttgaagatctaaaagtccctgactatgtggattgggtttctaagccccagccctgtgcaa

SEQ ID NO: 54073 - DNA, 307 bp, Mus musculus
  source 1..307: mol_type = other DNA
ctctgacctcacagtgagggttaggagcctacattacatatccaaaaactgtgaatgaatgtcatttattaggcgccagacagagcatgacgccagcatctgtggaagtcgttggcccagagcctggccagatctcgccgggcgcaggcagggacgccactagtcagcgagggcccttcatgtggtggagtcctcctggccccagggctgggagcccagaggaacaaaactttttctccagcagctccattgggcggagcgcgcatctacctaccccagctcccagcagccggagaaaacctgtttg

SEQ ID NO: 54074 - DNA, 267 bp, Mus musculus
  source 1..267: mol_type = other DNA
gggcaaaagcaatttgaccaaacatgtccatctgtagatggaggaaggcataggagttcctccgtgcaatagtaacaatgtaaatagctcataaaggtcttgttgggagcaagatgctttccacatatctcagggcatatctctaagagctcttcccagctgcccttagtggtcctgtaggccaaggtttaaatctctgagaggatcttagacaagaagtctagaatctgggttcatgcagaagtcatttacctgtaaagcacattt

SEQ ID NO: 54075 - DNA, 353 bp, Mus musculus
  source 1..353: mol_type = other DNA
gcacctggcagctccactgagtaaaaggagaagccccctccagtttccacaggctgataaaagagctgcagtaggaagcttatgaagttcttatttgcacaaacagtgccagtttgtccatcaattatcagtgctgaccgaggctgtgcactcagtgagcagatgctccactcatgagtcagtgacaactcatgaccatgctgcagctttgaaggtgaaagttagcctggatcatggatgcaaccctccctgaacctttgaaatctctagagatattactcctggtgagagtagtggtcccaggaacaactagaatgtagtccttcctcaaagtgctttaggccttctaagac

SEQ ID NO: 54076 - DNA, 267 bp, Mus musculus
  source 1..267: mol_type = other DNA
acacacaaacacacatactctctctctctctctcttgtattctatactataccatcgtgtggctggtccctccaggggtaagggatgcctcagcatggattttataaacacacaaaccagtgttttgtctttcttacgttttaaaaagtatttattttatataaacctgagcaaatgtgtgtgcaccacatctcctgcaactggagttacagtgggaactgaattcgcaacctatataagacaggtactgtcccatttatcactttt

SEQ ID NO: 54077 - DNA, 105 bp, Mus musculus
  source 1..105: mol_type = other DNA
ctcgcagctaagctgagttactctgactggactagtaacccctggagagtcagtgcagaagttgcatgtctgagccggacacctatgggctcatagctgtacact

SEQ ID NO: 54078 - DNA, 236 bp, Mus musculus
  source 1..236: mol_type = other DNA
gtctgcagaggggaagcagggacccaggatagcctctgcgaggtaatgtcaggggccgaggcccccggaacactgtctaacaatgtcctctgagggtccaagtcacacatgcatgattgctggacgggccccctccccggcatggcatggccggcccaaccctggagagtaaggcatgccatggccagcccaccctcgagagtaactggggggggggggcgcgattccctacctga

SEQ ID NO: 54079 - DNA, 236 bp, Mus musculus; identical to SEQ ID NO: 54078
  source 1..236: mol_type = other DNA

SEQ ID NO: 54080 - DNA, 261 bp, Mus musculus
  source 1..261: mol_type = other DNA
acagaagcccctgtaaattctcatggaacacgtgatcacaacacccccacgtggatatcatgagacaaggcctcaagttgcatgcacccatcttccacaatgaacagtgtggggggaagccttcttcatacagagtccttctcctgcagaaggaggacaaggatactccgtggccctggccctgggctcaagggtcctcacagctggtgagatgccaccaccatgtggacatctttcctggaagggttctatcagatcaac

SEQ ID NO: 54081 - DNA, 249 bp, Mus musculus
  source 1..249: mol_type = other DNA
aaactgtattctatactataccatcctgtggctggtccctccaggggtaagggatgcctcagcatggacccttttataaacacacagaccagtgctttgtctttcttactttttaaaaagtatttattttatgtaaacctgagcaaattggagctcctgcaactggagttacactatgtgggttctgggaactgaattcacaacctatataggagaatgcaggagacaggtactgtcccatttatcaat

SEQ ID NO: 54082 - DNA, 182 bp, Mus musculus
  source 1..182: mol_type = other DNA
ctcgcagctaagctgagttagcctaagactcgatgtctgagccggacactgctgaacacccgaggcctctgagatacagcccagggcatttgcaccctagtgtacacttggcgcaagcttacaggagcatatttaggcctctttctgttgcagcgaatcagagataccagtgcgcaagctgg

SEQ ID NO: 54083 - DNA, 509 bp, Mus musculus
  source 1..509: mol_type = other DNA
gtagaaaattaacacatcctttatttgctgagtatttggaggataggatccaagtgtatcatttgcgaaatgaaaattagcttctgttgtacatcttgacaaattattttcaggcacgtaattctctactaggtgcaagtatataatcctttatatataaatttaataatgtacacaatcatttggactaattgagatagttcaaaataaagtaaaaggaatcccttctttgtttttaaatacttggtataaattgaaacacatgcatgtacaatagctaatttaaagtgcctttggtagtgcataaaaatccttcatgaaaactctttcaaaatcaatgtgtatatgattgcaggtgatatgtatatcaatgtgtatatgattgtaaacaccatggcaggacctgtactagcttgctcatcctggcagcagagaaatcccccgcagaatttaattccatacggggactgtttgggcacatcactgtggctacagcagagcgctggggc

SEQ ID NO: 54084 - DNA, 223 bp, Mus musculus
  source 1..223: mol_type = other DNA
aataaactgtattctatactataccatagtgtggctggtccctccaggggtaagggatacctcagctataaacacacaaaccagtgctttgtcttccttcctttttaaaaagtatttatttaatgtaaacctgagcaaatgtggagctcctgcaactggagttacatgggaactgaattcgcaacctatataagaaaacaggtactgtcccatttatcaatag

SEQ ID NO: 54085 - DNA, 236 bp, Mus musculus
  source 1..236: mol_type = other DNA
ctcgcagctaagctgagttagcctaacctctgactcgactagtaacccctggagagtcagtgcagaagttgatgggctcatagtgtactgtttagggccagactctacacccaaggccttgcaccctagtgtacacttggtgcgcaagcttacaggagcattgcatgaaaattccctctttctgtgatttatgcgcagagtgctggtacccagtgcgcatgtgcaagctggtacac

SEQ ID NO: 54086 - DNA, 291 bp, Mus musculus
  source 1..291: mol_type = other DNA
atacatgggaatttccattcacttgaactagtgctaaaatgtttccttatcacctaattatgagttaaattgagttgatatcagaacatgaagttggaggcctatactgcatagacatctgtggtaagatcttacaatagctcacagtctttgcaatacggatctttgctttaacaatatagtgtctgaagagctttcctagtgataaaaagatctcaggcttactttaaaggaactctagagtcaattcagccagcctgagagagaagactctaagatttaaagctaggg

SEQ ID NO: 54087 - DNA, 384 bp, Mus musculus
  source 1..384: mol_type = other DNA
atatgtcaaaattatagatgtttatctttgatgttgcttttgcccacagatactgcagtgtcacagagaagttctcatcactcttctcacagtatatttaagaaaacagttacttgtgctgccatgaagttgaattggcagctgcttacaacacatctgaaccaagacgcttgttttgggattcatggtataaactgccattctgaaattcaggacagtactctcacaggagcctggagtgccgtctggcatagacagggctcaggtctgactttaagaaggactccgaacaatttacttaggattcatgagttttcaggccaatcgcagccgacaggccgggcgggaccgaggccgaggcggggcttcgatctcagtacccca

SEQ ID NO: 54088 - DNA, 487 bp, Mus musculus
  source 1..487: mol_type = other DNA
caagattatacttacaatgtagcaacaaaaataattttatgcttgggtgtcactacaacatgaaaaactgtatctactgtcttagagtcctagaggtctcccagacacctctttttatttctgaaattgaaagaattgaatcagctatatccacaggctactaaataaattcttggaacacattgggtgtcaggagtgtcaaacatttgaagaccaaggccttgtcctcaccccacgcctggagaagaggacctgttgggcatagggctacacctggtttgtccaggtctgccaaccacaagccagatctgatgagacttggctgtagggtttagcagaagccacagtcttccatcacatcatcactcaccggaagcctgtgtgcagtcagagcctgcaagctcatgagggggtggcaagcaagccggccgcacaggtcctgcagcctccagtctcctggttgcccaactggcggctgggggaaagg

SEQ ID NO: 54089 - DNA, 261 bp, Mus musculus
  source 1..261: mol_type = other DNA
tggtcagcataatgataacaatgaacatttacctgtcagtaggaatttcatagaaatgattgcttcttttcatcttcatttgtaaggattggcagagccagatttgaatttaagaactttccctctgactgaacaggtaggagcgcctcctcctggatgagcccgacctctttgagtccctcacttctgcctctaaaaggagctactctgctccctgaggtgcgcgcaggcagtgagtgacgcccgtcccgaccctgccgc

SEQ ID NO: 54090 - DNA, 303 bp, Mus musculus
  source 1..303: mol_type = other DNA
ccccaagcctgggaaatatgacaggcttatcctaggcttggccccacctggtctcaaggccaccttacttgggagatctcggaactttccagaaagaagtgtagaactccagcccttgggtttccatattggttctaccatatggatggtgacctttactaggagaccatggcctggccacttgatgttcccagtgatctgatccatgggaggcgcttcatcaatgatatgggatcaacaggggcctctcttgttgcttgcgagagtgcgctgagccgccctcctgcagcgctgcgcatgctc

SEQ ID NO: 54091 - DNA, 404 bp, Mus musculus
  source 1..404: mol_type = other DNA
tggtgaagtgcagagcttctgctgttccagaagctggaaaaaattgggtacacatggtggctgcccattggtgtgcatgcatgttgataggtacatgtcagtagggtatcccctgtaacattgcccactttgtcctggaaaaatggtgtttacttgccagcttccctctcaaccccccatgggtagagggtcttgagaagtatggcaacctgctgccccagctgccagtgtcctcggagggccatgccaggctaggaagtgctggcattccctcgcatcctggggacagcgcacaccgggcgcaaggctcaggagcaccttgtccccagagccattctctgctgctgctgctgctgctactgctgctgctgctgctgctgctgctgctgctgctgctcctcctc

SEQ ID NO: 54092 - DNA, 260 bp, Mus musculus
  source 1..260: mol_type = other DNA
cacctttacatcttggaagaccatgtctcatttggaccctcaagctgcatcctggccggccagtaggggttgagcaagaagataaggagcttgtttctctcctccaaacttctcaaaggcttcagggatgtgatcctggatccccttttggatagtggaaagtttgactctgtgagactgtctgcccaaagacaccaagggtctcttccttgaagctgccagggggggcaggaagcctgccccctccctcccagctgccc

SEQ ID NO: 54093 - DNA, 495 bp, Mus musculus
  source 1..495: mol_type = other DNA
ttcctgcttccagggaccagactggcgccaagcaggggcaactgcaacatgtcccctgctgggcccccttggcctctgccctgaccctgtcccgcctgggtggaagccctagctcagcctgcggcttgctacttagtcggtccgaaggcagagccttccaaggtggaatctggattctgctgccaggaagcggccggcgcacgagtggcgcgaggcttggcttccacgtgctccgagcgcccaagcctgggggatccgacgccctgccgtggcactagctgtggccaggacgtccgggtgcagtcgcctgcctctggatctcgcagtggggccgagtcagctcttacgggactcgccgaggcccacaacctcggtgaccctcttacttctccacacatccaaaattgaacttggggagtgatggcacttcacagcagcgcccaagtggcggcagcctcgggtcgcccggggacactgaaagcctgccctcaggac

SEQ ID NO: 54094 - DNA, 372 bp, Mus musculus
  source 1..372: mol_type = other DNA
gagaaaggacacatggccagatggggcttttttacctgctggactagaacacccaggcaaggagagcccttgtgtgggctggctggaggccaccagccttagtgtattgcagtaaaacgacttctttccacgtggatccatgggaggcgcccctcttcaccttagctaggctgtagtggcatctcacagtaaaatacattaaggcctgattggcccattatacagatgggggcttcctgcttccagggaccagactggcgccaagcaggggcaactgcaacatgtcccctgctgggcccccttggcctctgccctgaccctgtcccgcctgggtggaagccctagctcagcctgcggcttgctacttagtcg

SEQ ID NO: 54095 - DNA, 424 bp, Mus musculus
  source 1..424: mol_type = other DNA
ggcctgtagactcctactctgccaaagactcctactctgccagggagtggcatatgtgcctccgggagcatggctgttgcaaaggccctggggccacgctaccagaccactgtggccagaacccgggaattgccttacaaggctctctgcagtgctgcggccacagccaccgcgtgctcggctgcccagggctcgcggggccgcgcgcggagggggcggggccggcggggcgcgggcggggggctccgcggcgacacaacagctactgcgctaggagacattgcggcggcggcagcggcggtggcagcagctgcaggtccgcaccacccccactctggactaggggcaagcaggcgagcgggggcgggtgggctggggcgtacagggcccaggccaacaggcacgtgacgcccggcgcgccccc

SEQ ID NO: 54096 - DNA, 306 bp, Mus musculus
  source 1..306: mol_type = other DNA
tcctcaaaattttgggtgaaagtttacctcagtattacctggcaaggggcctgtagactcctactctgccaaagactcctactctgccagggagtggcatatgtgcctccgggagcatggctgttgcaaaggccctggggccacgctaccagaccactgtggccagaacccgggaattgccttacaaggctctctgcagtgctgcggccacagccaccgcgtgctcggctgcccagggctcgcggggccgcgcgcggagggggcggggccggcggggcgcgggcggggggctccgcggcgacacaa

SEQ ID NO: 54097 - DNA, 257 bp, Mus musculus
  source 1..257: mol_type = other DNA
catggagtccccttctgtggtgacaaattgtaactctagcctccaggctgtatctttgagagacagctcagtacttctggcaaagttccacagaactcttgttactttggtgcagggaccaagaaactttgcacctaggtcctaggacaaccttggtgaaggatggtccaccggcggtagcagccatcctgctcccaactggagcagcgtctcctctagaggaggaggacatcaccgggagttggttcttaagcagc

SEQ ID NO: 54098 - DNA, 476 bp, Mus musculus
  source 1..476: mol_type = other DNA
ggctgtgagggccaggaccacagctgtgcgcttcagcgtggtcacccgtgagggccttgagcaggctgagggctggaactgctgcctgaggctacagttgcagacacaactccagggtcgtggcctcttcaggcagcccgggtggaggaactggcttccctcacagactgtccccttagcccctgaggtcagagcctcgagaggtcttaaggagagaggctgtgtctttcccccccgtgacgcccctccccggggcaccaggcgtgtttgtccgctgagcagcccggccccacccacctacccctccccaggggtggtgatggggaagaggaggagtccgagttaggggtgccccaccccgttacccctgcgtgtccgaagtgtcagaggcgcggcagggtggcaacaggccgcgcctaagggcggggcgggaaacgggggcctcttccggtttccgcccgcgggctagggggcgg

SEQ ID NO: 54099 - DNA, 315 bp, Mus musculus
  source 1..315: mol_type = other DNA
agtccacagcgccaggtggctttcgaggagctgggcctacctgggcagcctgggggggggtggggaggactggcccctgtcctcgcgtccccgccttcctccctcatgaagggactggggcatgcatccgccccctagcccgcgggcggaaaccggaagaggcccccgtttcccgccccgcccttaggcgcggcctgttgccaccctgccgcgcctctgacacttcggacacgcaggggtaacggggtggggcacccctaactcggactcctcctcttccccatcaccacccctggggaggggtaggtgggtggg

SEQ ID NO: 54100 - DNA, 376 bp, Mus musculus
  source 1..376: mol_type = other DNA
agtccacagcgccaggtggctttcgaggagctgggcctacctgggcagcctgggggggggtggggaggactggcccctgtcctcgcgtccccgccttcctccctcatgaagggactggggcatgcatccgccccctagcccgcgggcggaaaccggaagaggcccccgtttcccgccccgcccttaggcgcggcctgttgccaccctgccgcgcctctgacacttcggacacgcaggggtaacggggtggggcacccctaactcggactcctcctcttccccatcaccacccctggggaggggtaggtgggtggggccgggctgctcagcggacaaacacgcctggtgccccggggaggggcgtcacgggggggaa

SEQ ID NO: 54101 - DNA, 401 bp, Mus musculus
  source 1..401: mol_type = other DNA
caatgggcccttaggctagttggcccccaaggtgccctatgagagcagcaagggagccagctgctactggcactcccttccctcctatggtggaaggatccagacccatccggaaggacctcccagggctcaattctcaagcctgtctttgtcagtgcctcctctgccttagcctggacaaagacaggcattgaactgaggctgaggctgtcatttcaggggctcagtgcctttggccctgtggaccctgtccttttgtctctacatcccagggggtttctccctggagatggggagtggcagggagctccctggcaggtccctggcctgggcctcttggaggcagggctgccttggccaggccactattgacaaagctgccccatgaatggggctgagcc

SEQ ID NO: 54102 - DNA, 320 bp, Mus musculus
  source 1..320: mol_type = other DNA
ggtctgtgcacggttcaattttgcctggcctatgcagcatagggaatatcaccttccctgtgctttgggggttctcccaaaagcagacaaggaagcgtgtggtgctttggtcgccacgacacaacaccctagcgacgagccccgggaagggccagcaggggcgcgccccgaaacaagctccggccaggccgctacctggaaagatgccatcgccgccatcgcctcttctcttccgaggggaaaagagaggcggcctcagcacccaatcgtgcgtcggcgggctgacgtcgctggcggcactgacgtgtccgaatgctagc

SEQ ID NO: 54103 - DNA, 337 bp, Mus musculus
  source 1..337: mol_type = other DNA
aagagcaaaagtacttgtctacttttctggaactctccatagactctaggtagcatgctggcacagtatatcctgagtgcttatccctcagttaccaactagctcatgggcaattgggaggaatgagttgcacatagaggggaggtctgggctcccacctgcctaggtcacctctaaaaggacacttatatgggttaagtgggaagttccagaatgcatcaagtaccctgcaacatttggatcctacactgtggggaatcagcctagggacagagttgctccctctgtctctagagtgtggccaggctgcttgcccacagctgagcagctgggaggc

SEQ ID NO: 54104 - DNA, 129 bp, Mus musculus
  source 1..129: mol_type = other DNA
ccagcctggtctgtgggccaggacacgtggcctcttcaaaagggggtctaccttcccaacccttccggagggactccgggtctcaattgggtactcacctcccaaggacggcagaggagagctagcatt

SEQ ID NO: 54105 - DNA, 179 bp, Mus musculus
  source 1..179: mol_type = other DNA
gtgggccaggacacgtggcctcttcaaaagggggtctaccttcccaacccttccggagggactccgggtctcaattgggtactcacctcccaaggacggcagaggagagctagcattcggacacgtcagtgccgccagcgacgtcagcccgccgacgcacgattgggtgctgaggccgc

SEQ ID NO: 54106 - DNA, 620 bp, Mus musculus
  source 1..620: mol_type = other DNA
acaaaggtatccgtttctcagttcagtctttacctgaactctcttcaggagtccagggaagcttcttcttcagacaggatcctcttttctcagggacacacctagcagacaggttggtctcagggactcaggccccgccctcagctccctgcgccgactcctgaggcctcccccgctgttgctgcgggcgcgcgcgcgcgcgttccggtgttccaggcaggagctggagacaagcgaccggctgtgggccaggctctgagagagagcgggaccctgcgaggctacagctggcgtgggcctggccgcctctccgtcggcgggccgggccacgtcgccaagcccagaggctggactcccggggctgatggccatgggcgggagctggagacgacagcggcaaaggcagcggcagcggccggccccgcgggcggggagccgtgtggcccacggcccctgacagcccctgacggccccggcgggcaggcgcgctcccgcgcctcctggggtgggggggccgtagccaggcaacgcccggcgcgcccgcccatcccccgccgctcttgggggcgtgcccccctcccccgctaggcggctcggccccccggggtaaggtatggccc

SEQ ID NO: 54107 - DNA, 338 bp, Mus musculus
  source 1..338: mol_type = other DNA
gaaaggctcaagttttgctttctgggaaagacagtttataagcactcaagtggaaaggactcactcgccagagcctggagataaagaccagacatctctctcaggcagcctctgggaaccaaatcttttcctctggtttatcaagaagaacaaaggtatccgtttctcagttcagtctttacctgaactctcttcaggagtccagggaagcttcttcttcagacaggatcctcttttctcagggacacacctagcagacaggttggtctcagggactcaggccccgccctcagctccctgcgccgactcctgaggcctcccccgctgttgctgcgggc

SEQ ID NO: 54108 - DNA, 301 bp, Mus musculus
  source 1..301: mol_type = other DNA
agctagccggaaaatctcctttccaaagctttccgaagggcgctctctctgagaagggactgtatggtgtgcctcgccacacctccttcgcaggctggggcgtcgtggctgggcaggggtttctgccctgcatgaccagggcgcggcccggacctaatgagcaggtaatctggttcccagtctggatgggactgctggagctcctgaagaggaccccccccccccacgaggtccctatcacgcgcggggtgcgggggaggtgatctcactacctccccctcccgcgcacgctgccccgccc

SEQ ID NO: 54109 - DNA, 230 bp, Mus musculus
  source 1..230: mol_type = other DNA
cccaaggggctgagagggctgaagcccaccagactctctgggcagaaagagaccttgactgttggctagccttgcaggtgctgcactagtttcccacagcactgctataccatatgttctagaaatggaggctaggaacttacttcctggtgagaacagatctgagcgctgggccaccttcacgctgctgcccaggtgcccagaagcctaggccctaatcaccagtctga

SEQ ID NO: 54110 - DNA, 410 bp, Mus musculus
  source 1..410: mol_type = other DNA
tcttctacagtgtacttacatataataaataaataaatcaaaagaattcctgcacaattactaatattgcctgtaaaggttgccgacatagagacaatatctctttaaaaaaaaacaaaaataaaataaaataaaatttattatttctgatattttcaagtgcaaggttcagtgctgttaaagtacatttacactctctttttaaattttattttatttttaatttaatttttacactcccgaaactccctggggcctccagtctcttgagggttagaatgaacacagacctggaagtcctctgctgatctcaggggtccagattacttgagactgctgatcctcccaggggtcagctgcttctgtccattggttgggtgcaaatatctgcatctgactctttcagctgc

SEQ ID NO: 54111 - DNA, 419 bp, Mus musculus
  source 1..419: mol_type = other DNA
aagacagatggcttgtcacctgcctcctgcctgcctgctgtgttgttgagtccagcctggattgtgtaaagccaaccagggctatgacaaattaataagtagatcttgccttattgaataaaatcaccatcatccttggataaaggtaatctcttccggcagcaggaagtggtaactaccaaccccgctccctccccctcagggggcccagggagagcagaactcccataggcctcactatgggctatgactccaggaaggcttcagaggcgaggaacagcagcaggtggtcccagacatgttgagtccttgtctcaagagagcccacccgggcagtgccaggtccaagtcgccccgcccctccggggactgtgctgggggcggggctggcggggcggggcccgcggagggtgctggcc

SEQ ID NO: 54112 - DNA, 398 bp, Mus musculus
  source 1..398: mol_type = other DNA
ggcagatttctgagttcgaggccagcctggtccccagagtgagttccaggacagccagggctagagcaccagactgctcttctgaaggtccgaagtgtctgaaacagtgtacttacatataataaataataaataaatcttaaaaaatgttttaaaaaaaagacaaaagaaacaagtacctctggcattctggttgaaattctcactccacagaattctgctgagcaatgagggtgcccagtgggtagtctgcaactggcaaccagggctaatggttgtaggattcagtcattccaggggcaccctatcacaatctgttgagatccagggggatctagcagaaggcggggtttgaaaccccgcccttcgtcccgcccccaactcggggcccttcggaa

SEQ ID NO: 54113 - DNA, 400 bp, Mus musculus
  source 1..400: mol_type = other DNA
acgaccgggcgtggggaagtggcaagatggcgactcccagagtgggggggagtgcagggcggggcactactgcacctgacctgaacgtttttaaagaagcttttaattctttatgagctttaaggggaggagggggaaaggtgacgtcttctgaccccgccccctcgccagggaggaggcatgatttcgagcggctcctgtgggaatggcggctcccagggcggccgccacagcctgaaggtcggggcttcgagcagcaactgagagttggagcccgttgtcggcgaagttgagacaaccgcggcatttgtggctcttttccacccgccccggaagccagccagtgctggggacggggggtgtgggaaccgggccggggctccgccatttccggcggggg

SEQ ID NO: 54114 - DNA, 292 bp, Mus musculus
  source 1..292: mol_type = other DNA
aaaaaaaaattcagataaggtaaaatgtatccatttttaaaattttcaattttaagtgttatctaacaaaccacaactgaatataaaagtactcgctttttactctaaccattggtaccggtgcaaaagggacagcgagggccccttccttgaaccaagagggaaaggtggccctcaccatcaagggaggtccttttgtttgtggcacccggctcgccggatcctccccccctccgagggagggtacaactgcaggcaggtcggagcggtccgccttttccgccaggacctg

SEQ ID NO: 54115 - DNA, 432 bp, Mus musculus
  source 1..432: mol_type = other DNA
tattaagagacatactggcccagctgccaatttggctggctctctgtgtaggaccacagagctccttccccgcgtcaagggcggcgcgggacgcccccgtgtggcggaaggccgcggagggcaagatggcggcgggtcgagcgccgcctcttccgcccggccgggtgtcgcacgaggccggcctgaaggggaagtgagtcagtgtccgcggacccggcccgctaaggcccgcgcccgccgaggccccgagaggcctcggcccgggggcggcggcggcggccatggccggggggccgggccccggggagcctgtggttccaggcgcccagcacttcttgtacgaggtgtggagcccgccgactggtgccagttcggtgggtgacggcaggccaggcttctggagctgaagcctgatgttccccatcccgcagc

SEQ ID NO: 54116 - DNA, 290 bp, Mus musculus
  source 1..290: mol_type = other DNA
taatgctaagagtagtgcactcatatgaagaggacttcacatgtggctgtggtatcaccaacaactactctagaaaggggtaggagaagctgctagaccctactatcctttattaagagacatactggcccagctgccaatttggctggctctctgtgtaggaccacagagctccttccccgcgtcaagggcggcgcgggacgcccccgtgtggcggaaggccgcggagggcaagatggcggcgggtcgagcgccgcctcttccgcccggccgggtgtcgcacgaggccg

SEQ ID NO: 54117 - DNA, 353 bp, Mus musculus
  source 1..353: mol_type = other DNA
tctccttgttcagtactaaaacagtgcctagttgaatcagaaagtctcttgttgcatagtgtttaaaaaacaaacaaagaaagaaagtctcttgttgagcatttgtttagcgctttataacaaagaccaagatttagtgtaataatacaatcagtcccttggcttggaacaaggccgcagctgaatggggtccgcctcttttccctgcctaaacagacaggaactcctggggcgtcaccgctaaggctccgccccagcctggggcgcgggcgcgcaggtgcagcagcacagggcgcgacgtctgccgtgcggggtcccggcatcggttgcgcgcgcgctccctcctctcggag

SEQ ID NO: 54118 - DNA, 298 bp, Mus musculus
  source 1..298: mol_type = other DNA
ggcaggcaggcaggcaggcaggcaggcgccctcggtggccacttggcccagtgctggccccatttcctccaggtgtgcaggccagggtcgagagccctgtctgacagcatacaaagagctctcagcaccttctgcagggaccttggggaaagaaagtccgctcaaagacccgggcgaggtggggcgggcgcggcccagaagccccacccagaggctccgcccccaaggaaactttgcctctggctcctttaattaaagggccgtcccatcggcgaagctgcagcaccgcccctccgtt

SEQ ID NO: 54119 - DNA, 420 bp, Mus musculus
  source 1..420: mol_type = other DNA
cctggcacaccactgggtgccatgccaggttccaagtctttgagatgaaccaggtcatgtttccaagagtttttttaaaaaattctaccataaacttacaggtcggctttggactaaacagtctctgggtttgttggacaaaatctagagcagctgagaatatctttttaatatggtgataaatgtgtatatcaatgtgactattacaactattttaagtttcaattacagaactaggaaaactgtaccatataaagaaataaaattagtctgtatagttgtgcagagtgcagtcgaagacacacacatataaccgagataaacttgtgactgggtcacagggcataagcctccataagcaagcgtgtgcgcatgtgcaagcgcgggcatgactgggcggggcatgccagggccttttaa

SEQ ID NO: 54120 - DNA, 377 bp, Mus musculus
  source 1..377: mol_type = other DNA
tcctcaaggcagctggattcgaggattgcttcctgaggatgccacagtaagaaagcaggtaattagtgtctccttatgagcagaggaggacagtgtggcaccctgtctagacaatgtcaagaagctaaagtccaaggacattgtgcacttgaacagcacatgtgagcaccttcaaggctgagagaggcagtcagctcctaggcccaccaataaactgctacacagttgtgttccagatgtctgcttgaaaggtttccaggagctgctttcagctagtagaaagaaatggaacacaaatctttgtaaataagcccttgtaaacaagggcttccacaagccctactgcgtgcaggcaaatggccctgagccacccctgt

SEQ ID NO: 54121 - DNA, 307 bp, Mus musculus
  source 1..307: mol_type = other DNA
agagaagacctctccccccagaattcctcagggcccaaggacagatctacatgcatcacagggcaggcaggcaggcaggcaggcaggcgccctcggtggccacttggcccagtgctggccccatttcctccaggtgtgcaggccagggtcgagagccctgtctgacagcatacaaagagctctcagcaccttctgcagggaccttggggaaagaaagtccgctcaaagacccgggcgaggtggggcgggcgcggcccagaagccccacccagaggctccgcccccaaggaaactttgcctctggctc

SEQ ID NO: 54122 - DNA, 411 bp, Mus musculus
  source 1..411: mol_type = other DNA
ctttgtacacttgtctaggtctctaaggtcacaccaagcttagagcctctccccccagaattcctcagggcccaaggtacagatctacatgcatcacagggcaggcaggcaggcaggcaggcaggcgccctcgtggccacttggcccagtgctggccccatttcctcgcgaatggaaccaggtgtgcaggccagggtcgagagccctgtctgacagcatacaaagagctctcagcagacacaagtatgtgagatctcacaggttgggaaatctcacaagccggttttggtcaagcccctcggcggcctagcttccctcagctagaccggtctgcaccggccgttctggctagtttgggcctgccctgaggagcgcgcgcaacctgcgtagccgcggctgtgacgcaaatgt

SEQ ID NO: 54123 - DNA, 269 bp, Mus musculus
  source 1..269: mol_type = other DNA
gtctgagtgactgacagaacagtgttcccgttctggcagatgtacattttgaattcttcatagtgaaaagaagaggtgtgctacacctagtttttcggggctacacgtcttttcctgagaattagccaaagcaatcaagcacctagtgggtctccaacctcccgggtgacaaaggaacttcggagtccctacggaacgattggcaatcatacatgcgcagagcagcgctgcatctatgatcttaggaagataggccgcctatataaggc

SEQ ID NO: 54124 - DNA, 329 bp, Mus musculus
  source 1..329: mol_type = other DNA
gtcgtatccggttatgcatgcttctgaaggctcacacagagaccggaaaagggcatcgtcccagaactaacaaatttctgccatgaggcattttttgggttttctgagcagtcgtcacacaggcaaacttaatttgggagtgcgcaccaacattgtggttcagggcctgaggcctgagagacaacaagcaaggacgcttccgatccccaagttgctattcgcttggcaaaagaaacacccgccagttctcaggcacagcctacgcttatggcccgcccctttgggtgggtctggaaaccagctcctgggctgaagggtggcgctcagcc

SEQ ID NO: 54125 - DNA, 355 bp, Mus musculus
  source 1..355: mol_type = other DNA
gtccttgcctgttgtcgcaaaacatgcctaggttgcttgacggctgccagggcgggtctacgccagcctcgctccggccccgtcgtatccggttatgcatgcttctgaaggctcacacagagaccggaaaagggcatcgtcccagaactaacaaatttctgccatgaggcattttttgggttttctgagcagtcgtcacacaggcaaacttaatttgggagtgcgcaccaacattgtggttcagggcctgaggcctgagagacaacaagcaaggacgcttccgatccccaagttgctattcgcttggcaaaagaaacacccgccagttctcaggcacagcctacgcttatggccc

SEQ ID NO: 54126 - DNA, 346 bp, Mus musculus
  source 1..346: mol_type = other DNA
gtaggctgtgcctgagaactggcgggtgtttcttttgccaagcgaatagcaacttggggatcggaagcgtccttgcttgttgtctctcaggcctcaggccctgaaccacaatgttggtgcgcactcccaaattaagtttgcctgtgtgacgactgctcagaaaacccaaaaaatgcctcatggcagaaatttgttagttctgggacgatgcccttttccggtctctgtgtgagccttcagaagcatgcataaccggatacgacggggccggagcgaggctggcgtagacccgccctggcagccgtcaagcaacctaggcatgttttgcgacaacaggcaaggacgc

SEQ ID NO: 54127 - DNA, 394 bp, Mus musculus
  source 1..394: mol_type = other DNA
gccagggctacacagagaaaccctgtcttttacatagtgattttgttcagaccacaaccctgtttcaaccagaaaagtctctacatgtgtttgaaggataatccctgtccccccctaatttacagtgggctgtaaaaagaaacagtgtttagtgccaaatgacactgacattgttactgaagggagggttcccttcaaagggagtgcattttctcttttataccagagggagggtctatctttaggaaaaagacggctgaaccaagtagcagcctgtagcgctcgatcccgcctcctttctcataaggagcgtgcgtcatgagtgccactcacttggcccaatcacagacgagtatgtgagagggcccctcccagatcgttgagggcgccggtc

SEQ ID NO: 54128 - DNA, 403 bp, Mus musculus
  source 1..403: mol_type = other DNA
tcactccccaagctttatggagcttccagcaacagccatgaacttgaggttccttgaaacaaagtgtgctcactgggtttctggattattcccataaagactgcctgtcaagtctgcactgaacagtagatttttttttcttgactgaagggaagaagtgctcagtaagctgatactcttaacaaacctacttagagtagaggcttgttacttttcctggccttgggaggaatcctgacaatggtagctccgctactgtgcaacaacacacagcagggcttccataccttgtgtttctcccagggggcggtacgggagcgcgcggggcggggcggggcgcgcgcggctcccgcgcaaggatctttcggcccctgcagtcattctggtgctgggacccaggtga

SEQ ID NO: 54129 - DNA, 334 bp, Mus musculus
  source 1..334: mol_type = other DNA
ataaagatattttctatgtgctgcacatgttcagtggcttgtgcacaacatgtaaacaaacacatttaaatttttatgtgtatggctatttatctgctgcctgcagaagccagtatctccaggaattggagcctcacacaaatttttcaggccaatttctgagtttgaggccagcctggtctggggtacacctgactgagacatggctctcagttccatcatccaagttgggagcagcgcgctcagtccggcctcctgtgaggcggggcgaggtgcgatcagagccgcgggcgtagggcagggcctgcgtccgcacgttccctgccgcacattg

SEQ ID NO: 54130 - DNA, 362 bp, Mus musculus
  source 1..362: mol_type = other DNA
cttatatgaaaactgaattatatctcaataaagcggttacttcttcttgggtgcgtgcgcatgcacacacaaagaaaagagccctgggttttgttggaccggccaaagcaatatcttgcaacagtagcaggtggccacgggctcctggaggcgcgcactccaggcccaagggggtgtggcgcggccgcgcacagattccagggttgctgaaggcagcaggcggggagcggcccgcgcctaggactcagccattggatcccccatgagaggcttgcttcttgcactagagtcctgggccccagggcctagcggcctcccccacggcccgccctctctgggagccccctcccggtgtggtggcc

SEQ ID NO: 54131 - DNA, 316 bp, Mus musculus
  source 1..316: mol_type = other DNA
ctagaactcactatgaagaccaggttgacttcaacttcacagccaccttaaaggcatgtaacccaaatatgagttatgtagatcactgatatgttcctcatgttatggtgaccccaaccataaaattattttcattgctacctcataactgtaattttgttactgttatgagttgtaatgtaaatatctgatatgcaggatatctgatatgtgaccccaacttgggtcaacccacatttgttttttagaaaatatcaccttaggtcccttttaaccaccttccccgttcgcgcaggcgcgtgtggaatggcagcct

SEQ ID NO: 54132 - DNA, 285 bp, Mus musculus
  source 1..285: mol_type = other DNA
actcaggaggcagaggcaggcagatttctgagttcgaggccagcctggtctacaaagtgagttccaggacagccagggctacacagagaaacaacaataagataaacaagtttattttgtacacctcagggaccttttaaaaaatgacatgcatatgtttggctgtatgtttgtatgtgcaccatatgcatagtatcagtttaatgtcttatctgaggaggtaaccacacaagaatgtactctgacacaagcccgccaggggcgagtgcgtgggggcgggacgag

SEQ ID NO: 54133 - DNA, 350 bp, Mus musculus
  source 1..350: mol_type = other DNA
tgctgagattacaagtgtaaccaaattgcttctgtaaaactggcccagctgccctggcactgtaggcggtagcaatgttccaaacatcccttcaaaggctcaggtttacctccgcatgtgcttctgaaccgatgctcttaaagaacacatatcaaccttatatgagccatgaaagctctgatatcaagtcacaattccaacatttgagagcctgaagcaagagttaagcaaacatgaactgtaaagtgtatagtacctcaaagtctagaaggagatttcatcttgaagtcggcacctcccacccagcctctggaggagagggaggaggccggtctggaggtggagcctcc

SEQ ID NO: 54134 - DNA, 512 bp, Mus musculus
  source 1..512: mol_type = other DNA
cattcaatctctggagattttatatatatatatatatatatatatccttaacttatatatattgattatatatattatcaacatctatctatatctatctctctatataaaatcaatccttatagtttgttgctcataaaatgagtgcttgtgcacagtcatccattaataaagatcggtgttatgacttgttcctccaaacaccagttgggagaagtcctgcctggccaggagagcctaggaatccgttgcgcctcacagtctggctaacagactccaggactgccggatccctccggtgctaggcccggggctcaggtcgatccgctcgacccagttgtctcgctctgccggctaggtgaagcaagtgccgcccgcagaaggccacagcccacaggcgtcgctccgccataggcccataggctgtgctgtaggtccgcaggtcctcacggaggctccacctccagaccggcctcctccctctcctccagaggctgggtgggaggtgccga

SEQ ID NO: 54135 - DNA, 410 bp, Mus musculus
  source 1..410: mol_type = other DNA
cactgatgagcccatttctatgggaaatggggattcccgtcatttctaggttctgggttcccaaaactttcatagatgccaaacccttgttggcatgagcgagcaattcagtgcccatgtctgtcaactgctcagaattgtaagtaacactaatgtctaagacttgctgccagcacctgatggttgcccttataggtcccacaaagcccagcatagacaagtccaattctgggccaggatttcccaaccctggcttgtagacttttctaagcagacagtgtttgcttatgatcaaattccaactaactgggaggaatcagtacagactccagccaatgtgttggtggcaggggactggtctgctgagtcatttgttcttgttctctttgggattaacaagacatagaacc

SEQ ID NO: 54136 - DNA, 280 bp, Mus musculus
  source 1..280: mol_type = other DNA
ctgtctttgcagagggatccgaccgctccgacagaaccggagctctccacttccggcttccggtgtcgtaagtgcgggatccggaagtttttttgagacagggtcccataagaccagggtctcgaactcacccaagtttcagtctggtcctgctactgggctctctgccgctgggcccccaccaagagggcctcgaaggtccagcccattggccagggatgcgcgcgcatctcctctcctgcctctcctgaggcgggtcagctcagtcaaagcacacgcc

SEQ ID NO: 54137 - DNA, 188 bp, Mus musculus
  source 1..188: mol_type = other DNA
gggtgggtgtatgcatgtattcccctcagtgaacagtcagcctcctgggtgggtggattagtacttcctgatttcctcagcgaactggctagtttctgatgcaaaggcatgtaggtaggtgcctgcagccaacctgcccacccccaccccggacaggggaggttctctcaactactgattgaagagaa

SEQ ID NO: 54138 - DNA, 234 bp, Mus musculus
  source 1..234: mol_type = other DNA
aagcgtgaagcatgtccctggcgtgtgctttgactgagctgacccgcctcaggagaggcaggagaggagatgcgcgcgcatccctggccaatgggctggaccttcgaggccctcttggtgggggcccagcggcagagagcccagtagcaggaccagactgaaacttgggtgagttcgagaccctggtcttatgggaccctgtctcaaaaaaacttccggatcccgcacttacga

SEQ ID NO: 54139 - DNA, 378 bp, Mus musculus
  source 1..378: mol_type = other DNA
ctttttcaactactttgaagagtggttaagagcactgactgctcttccagagataaccacatggtagctcacaaccatctgtaatgagatctgatgcgtgtgtctgatgacagtgacagtgtactcatattaataaaataaatagggttttttttttgttttttgtttttagaccaggctggcctcgaattcagcttcctcccaaaaaataattctgagagagaaacatgttcctatgtctcacatggacaggtcataaatcttgttctacagattgaccatcttgaatcagtgaaaatatccagtgtttctttaaatgactctcattacaggcatcaagggaaaacattccaaggcataaatcttgacttttagtcc

SEQ ID NO: 54140 - DNA, 365 bp, Mus musculus
  source 1..365: mol_type = other DNA
ataaactgactcaacaatatagctctcagtagtcacaataaatatcagtttatttttgttatttactgctgaattcagatcatttttgttcattagaacatttaaacagttctctctgttaactatatacatgacagatatgagccatagatttttgggatcattggctgccattaggtcacctagtgttttcctggggggaggaggggtggcaggctccttcctccctctgctaagcagagcatcctgcttggggtctccagaagcagagcctcctgcagcacagctcccttcctcaagtcctgggggtgggaggagcagcaacttggggcggcgctatgtaggtaggaacgcctggctagact

SEQ ID NO: 54141 - DNA, 539 bp, Mus musculus
  source 1..539: mol_type = other DNA
aaaaaaactgaaaaaatctgattttagcattgtagatcagaagaaaaagaatactattttttttttttttgtcagcaacaactaactggaaaactattggcaaatgtttacaatgaagataactaatgatctatcaaattcactagatatgggttataataacattacacactgctgcatattgcttccgtattaaaataacatgccagatccgcagggttatgtaaaattaatcaacctttttagtttgatgtagctgctagaaaatttaaaagtttacacggaatttcaaggagtaaacagctttcactttgacactgtgtacctcaatgtctttttcaattgaaactgacatgatagcaagcaaaaaaatgtctgtttgagttaaaaccagctatttatagcgcgctaaggagggtacagtacagcccacccgctgtagtctgttactgcagaagcctggccaaggttccaaggcgctctgccaagggtaggcgcatgtgcggtcacacctccgtggccgaatcagccaatgggat

SEQ ID NO: 54142 - DNA, 394 bp, Mus musculus
  source 1..394: mol_type = other DNA
aataacattacacactgctgcatattgcttccgtattaaaataacatgccagatccgcagggttatgtaaaattaatcaacctttttagtttgatgtagctgctagaaaatttaaaagtttacacggaatttcaaggagtaaacagctttcactttgacactgtgtacctcaatgtctttttcaattgaaactgacatgatagcaagcaaaaaaatgtctgtttgagttaaaaccagctatttatagcgcgctaaggagggtacagtacagcccacccgctgtagtctgttactgcagaagcctggccaaggttccaaggcgctctgccaagggtaggcgcatgtgcggtcacacctccgtggccgaatcagccaatgggatcagcaagctagg

SEQ ID NO: 54143 - DNA, 455 bp, Mus musculus
  source 1..455: mol_type = other DNA
gaaaggccttatttactcacctaggcacagaggtgttacatagttgattattctgtaacatctctccacctaaaagtaattcttctagggacgggggagagttttaaacccagtaaacattcattttgtttagaaagtctttcattagtctccagaccttcctagaaattgtgtggcattaacaacaggagatctggcctaaggtaaataaaaccagtttgctagcatataccaatgtaaatgatggtaccagcagcacacttttacaagtctaaacctggaaaggtgcattgcttgggaccaatgttgattcctgatgtcaggagcaatctggatgtaaagttcactcagctagttgcaactcgtggttggtaaaagagctgcagttagctcctgtcatctcgacaggcagaggcgtggttagagcggagctttcaagcaacgcttgctctgct

SEQ ID NO: 54144 - DNA, 458 bp, Mus musculus
  source 1..458: mol_type = other DNA
cttacaaagcatctaagaaccctgtgaggtactatataatgactgatatgtcaaaatagattgctatgggcataaatatagtaggagtaactaatcacttcatgtttgtatgcctaagtcatagggactgtctcctcccaattttttttactattataccgataaaataggggtcttcttttttctaatagactcacaactagtatatgtacagatgagactgcgtacacgtgctgtactcaaacgtacattattaagtggttggaatgcttttaaaaagtgtaagatgtgttttcctgaacttaaacagccttgaaattaatgtcagaattaacataagttcattgtttacataaatatgcaaaatctaaaataaattaaaaaagaagctttctgcacacgtagcaagcagcagctgaggtggttgtagcagctgctccacggaagccagctgcgga

SEQ ID NO: 54145 - DNA, 414 bp, Mus musculus
  source 1..414: mol_type = other DNA
tatgcacatttacatgaaaattaggccatatgttcaacaacagtatgaaagactggagaattcattctgagtactttaaagctacactgtattcaaatatctgtaacatttaaccacaaagagactttggagtccttagtgatagctagctctgcttcacataaaaacaagacacaaggctgtaacctgggctatcatgcagaccgctgagcaggcggatttctgagttcgaggccagcctggtctacagcgtgagttccaggacagccggggctacacagagaaaccctgtgctcagagcagcttacgtccgccaagggcgcacagcggctcgtccaacccggcgctcagacgcagcgaccagcccttagcttgaggctccgcccagccctggaagaacagcgcgggttccac

SEQ ID NO: 54146 - DNA, 557 bp, Mus musculus
  source 1..557: mol_type = other DNA
tttgtatattttcccctcagttcattggcatattttaaaataaaattagttttatatataagttaaccatgtgaatctgtaattttctataattagttacttgatgtgatacattcaacagacaaatatatatctaaaagcttttgtaaaaagtactttttcagatacagtaaaacactgtttctgtcaaaggctactcacatgaataaaatgtttcttggactaattgtgagcctaggaaccttaactgttttaggaccgactttcaaaagaggccctttattgcgccgggctctcatcagcgggcgggcaaaatgggcgccagcactatgaaggcgtctgccctggcggcctggagctactcacagcctacgtccgccccggcgggggaacaccgcctccctgctgcccagctagctgcccctcccaggtgctgctaggcgggcaccgcctctgagccccaggctccgcccctgtggaacccgcgctgttcttccagggctgggcggagcctcaagctaagggctggtcgctgcgtctgagcgccgggttggacg

SEQ ID NO: 54147 - DNA, 281 bp, Mus musculus
  source 1..281: mol_type = other DNA
ggcattttcccaattagtgcaagaggaaaggggtgatgaacagcagtatggaatcgtaagctgaataaaccattttttccccaactgcttcttggtcatgatgtttgtgcaggaatagaaaccctgactaagacaaattgatactggcttgctttgttttaaagaataagattggcatttttttcacataaactataaacatatcgaaagttttaagccactcttgcccattccttagatctctgagattaagcattagaataagcattagccttctggct

SEQ ID NO: 54148 - DNA, 539 bp, Mus musculus
  source 1..539: mol_type = other DNA
cattttaaatgtaaataaagaacatatccaataaaaataagcattaaatctaaacatatttctcagaatatatgcaaataatcatgaaaagaaatcttaaaaatattcaatatcactaatcataaagagattttgtgctcttctaatcagcagaggggaacaagattgcactagggaaaacagtgtgaatgttcttttaaaaatgtgttggaaatggagagacgtatatgacactttgttatttgcacaaaaagtataggattaaattttgtgtcttttaaaaaataaatagcaataaatgcacatgcatatgcctgaataataatatttgcatgtttgagcatggaaacccggagaagacaattattcgacttttgtttacttttatgtatttttctagatttaataaaaattaattagatttgcaattgtaacggcagagagatttttatattaatttttataataatttttatattaataggagagtggtcggtataattaaaaacagaacacattactctcctgtccgtttttgt

SEQ ID NO: 54149 - DNA, 241 bp, Mus musculus
  source 1..241: mol_type = other DNA
tggatgtttgaaaaagccataatcacacctattatttataagctttcttaaatcaatcaatctataaacctatatccacaggtggtgaacactttttaatcttgggcctcaggatgcaaaagtagcacagagaaaccctgtcttactaataaatttaaaaaaaagatttcttaaaccatatttaagtttaaattccttcagtacttaatggatccaaacaccggggcggatctacgtagtc

SEQ ID NO: 54150 - DNA, 402 bp, Mus musculus
  source 1..402: mol_type = other DNA
ggcagggtcaggcaggcagccactggatctctgggccagccccaggcccttggcctggccaggcactgcatgggcaggaccaaccccttaaagacctccagccccttagggctccagtggctggcagctgccctacagttgaggagtgtctgtgatcagtgaccattctgtcagagagacattctgcccagtggaagccatagtgctcaggctcagggcagagggagagcgcccagcagcctggcagttgcctttcttggtttcctggcagccaaggagggactgggggctccctgagaccttcttggcccaggagagacctgtggacagggctggcaacacaaggtttgtctagcctgactcgggaagcacagccttccaggtcctgagcacagttcaggc

SEQ ID NO: 54151 - DNA, 567 bp, Mus musculus
  source 1..567: mol_type = other DNA
attattattattattaattattatagccctggctgttgtggaaatcattttgtagaccgggctgaccgtaaccccagggctgggatgaaaggccattatgcccagtgagtatttgatatcattactattatttacagtgtgaaaggccagcactgtgtctgagccccaggttgtcatcctggctgggaaggccagtaaggtggcactgccttttccacagaacagtctgacgcactgtgctgctgtcagagctttcttccaacagctgctccagttagaatctggagtataaatgttgtatacataagcgtcctgggatagttaatttgcctttccaagtaatgtacttgactgtgcatgagtgggactgttctaaaataagcaggttacttggctactgctcaaactctaaataggtatatgggttgtagctatttgacctgaagcaacttgaagttcccttggttccaaaacgaaagcatgaaggcataaaagttttctctcaaggttgtgcttcagttcgaatttgtgtgacttgctctttaaagttgcaattgtaagaagaat

SEQ ID NO: 54152 - DNA, 170 bp, Mus musculus
  source 1..170: mol_type = other DNA
ggccctccaagctcattttggagctaggatgagcccattggagtccttcaaagccgaatttcccaactttacagttatttcagtaatgtttgtgaaacatgcatcttctaagttcttccaccaggtagggaatggccgctgtgaacaccatctgagccaatggctgtggc

SEQ ID NO: 54153 - DNA, 347 bp, Mus musculus
  source 1..347: mol_type = other DNA
agtttagcaaggcaaattgccctttgagatcctctatctccaaatctaattggctgagattacaacctggtagacataccttccttacacgggtgctaggaatccacttactcagcccaatgaataagtaggttgacaacttataggtttacaacttattatcaagaggacactagactaggattaactgaacaggaacacttccttttcgcagaagaagcagaccttctgcaagttcataactgcttgaaatgtcctatgagcagctgatgcagttagttgtacatggtgaagacgcacctgagggacatgatcatcctgcccgagatggtaggcagcatgatggg

SEQ ID NO: 54154 - DNA, 182 bp, Mus musculus
  source 1..182: mol_type = other DNA
ccgaatttcccaactttacagttatttcagtaatgtttgtgaaacatgcatcttctaagttcttccaccaggtagggaatggccgctgtgaacaccatctgagccaatggctgtggcaggaagtctgaggctcggctcccgggcgatcctcgccaacggaatgggtgggagctccaaagggt

SEQ ID NO: 54155 - DNA, 215 bp, Mus musculus
  source 1..215: mol_type = other DNA
gacttggtccttcttagaaaggggaaagtccatccagagactgccccacctgcaattgatgacaggatcctgatgtagctgtctcctgattggactaatcacagggtccccaatggagaatctagaatatgcagcagagatgacctagttggtcatcaatgggaggagaggcttttagtcctgtgaaggctctattttgatgagtccatagaatt

SEQ ID NO: 54156 - DNA, 355 bp, Mus musculus
  source 1..355: mol_type = other DNA
gccttttatgtgcttttaaaaaccccaaattctattctctaatctatggggataattcacatattgtctcaaagtataaagtctttacttctaatatacaatggcagagtatatacattatctttccaaattagaagaaaaagaaattctaaattgtaacctcaggtcttagaacaaacaatttagatgattagaagtcctacaatcataccaggcttttagccatgatggatgggagattcaataaccatgtatgtttacattttcataagatttcatttgttgatgactttctttgctaactaagcttccctttaatttaatttctttttaaaaaaatggaagcttatctaga

SEQ ID NO: 54157 - DNA, 367 bp, Mus musculus
  source 1..367: mol_type = other DNA
atcccctggaaatacagatacagatggttatgtgatgctgtaaaagagctattataagatatctcagtgtatgccatgtatttgcatatacccacaatatacaggtagttatgaactatatgacctgaaagtattttgttaagcaatatgggaaactttattttagtccatttccatgtaatacagagttgctttaaaataatctgaactataatcaaaatgtttttgcatgtctctctctctctctctctctatatatatatatatatatatatatatatatatatatgagtaattagccaggctcatacttcaagtgttgaggcctccttgtgaagtcattggaatttgatgacacaatagaatt

SEQ ID NO: 54158 - DNA, 528 bp, Mus musculus
  source 1..528: mol_type = other DNA
ataaatagtatattatggaaaaatctattttcagcaatagaaaaaaaagaaaattgataatcttttttgcttttgtaaatttaaaatttaaatacagctatttatttgtgtggttcttgtttgctcacacatgtgcaccattacacacatctggagatcagatgacaacataccaaaattgattttttttgtccactttccgggctgtgaatatggaactttagatcaacaggcttagtggcaaatgctcttgtgtatatttattaaagaagtacattggtaccttttaaaaaggtttttttcagagccgaggccagcctggtctacagagtgagttccaggacagccatggctacacagagaaaccctgtctctgaaaaaccaaaaaaaaaaaaaaaggttcctttgtgtttccgagagaagagagacttgtgtaaaacaggaagaaatctaccccctagacaaacgggttaaattgggagacctggcctgccagacacacaggggaaagactgacctctggccttc

SEQ ID NO: 54159 - DNA, 608 bp, Mus musculus
  source 1..608: mol_type = other DNA
ttacacgagaaccttctaggctaggttaccattccctcccccctcctcccgagccaccttggcgtgaggggtgtgggatcctctctgagcctggtaggggcctggttggggcccagagggcaatgctcaggcttccctcctccaccttgggcttggggcggggagaggtgtccctgcccccggggggctgggtctggacttggtccggggaagggcgggcctggcgtcctagcccttactggggggaggggctgccgcgtggggacgctgcccccccaaggagctcggggaggggccggcgggcacgcctggggagggcggcgcgctgtcgaccctcttggcacgtctcccagcctgggtaggcttgctcgcgtccgctcccagcggaggtcactggccgtgtcggtccctcccagtctcgacgctcgggagcgacaagccgccagcgcccccgccccgccgccgctgcagcgccctccggccgccattcgccccggcgctagctcttctcgtggactaggtggcgggccaggggtagcgcgcggctgctccggggcgcttggccctcgtcggcctccgcgcggcccggggttggtgacggtggaccc

SEQ ID NO: 54160 - DNA, 639 bp, Mus musculus
  source 1..639: mol_type = other DNA
ttctcaataaataaagcagccagcagactttcttgttgccaaggtcagtgtacttggatggtccccacttttcctgacttggggccctattggccctgtgtcttctaggacccagtgcctcaaagctaggagcggtgcagtgcagtgagcatgcactgagcagccgaaacaccgccctcaccttgcaggtggtggctgcggtctgtgaagcacccagttctcagcactgcagcccaggcctgtttgaagccgaacaagtccctggaaacccggtctactcaggagccccagggctcaggatcagcaggtgctgcagggccactgagagcccgggctttcgggagggcggcactcggggactacagaacaccaggagttcaatcccctgctgctggtaaatatccaagcagcagccggaagttcctgcacctcttccttcccgcttcctgccaagggggaggaaccagtgtgtgtgtgtgtgtgtgagagagagagagagagagagagagcgtgtgtgtgtgtcaagctggaccccgtggccccagtcccatgggcgtgggccccgcggcagggttgggccaacgccgggctcctccccgtcggttacgcaacaaggcggagcgagatgaaggctcttcc

SEQ ID NO: 54161 - DNA, 590 bp, Mus musculus
  source 1..590: mol_type = other DNA
aaatgagtgcaaacattgtatttcaaatttcagattaatggattctgacatgtggaagggttacatttcccaaatgtctcatcagcacaggttcctgaaaactggggaaactcaaaataatttttaaaaagaagaaatttaaaatttaactatatatattatgattatccaataagctttctagatgtttcttaaatttgagtgatgtttgtaaagaaataacaataaattatatctatagaagcaagacttcatctttaggatcaagaccaaatgtgaattctactgtgtccagtttactccagtattgctgatgaatccatggttcaggttcaagggtgtgagattgaaaagtcagacttgatattcttccagtatatctgattggaggaactgataatagatatcagatttaaacctctaccattccagttaagataatatgatagcatcttgttcttcatcttcctttttcttaatagggacataaaaccaatgaacattggaaatgacaataaaagtaaattttccatccctagtagtatactaaatgacacaatgtcaatgtcagtgcacaactgccaagcaga

SEQ ID NO: 54162 - DNA, 367 bp, Mus musculus
  source 1..367: mol_type = other DNA
tatgtatcaaatacatacatatatataaaattatattttgagccacacatacacacatatgtgtattactttatgatattgatctataagaataatgaaattattttatggaaaggcttaagtgtcaaagaagtcttatgactatatccttatagtaaattcttcttatcctttaacatactttcttgcaagcatttttaatttctttaactgaatagtataaataggctaaatttcagaaagtatcttacaaggcatgtcaaattgattaaatgaatcatataggatatattgatatgcattgtgacatttaccaacactatagaaagataatcttattcccttaagaacatgagttcatatttca

SEQ ID NO: 54163 - DNA, 380 bp, Mus musculus
  source 1..380: mol_type = other DNA
tatatgtggaaagatctattctacagattccgcatataatgccttggctttattgaagaaaaaatgttctgagagttattatatacaaaagtaaagttttatattttgagaagtacacacagacatacacacatatgtttattattttcaatgtaaggataaagaactcaatatattgtagaagaggtcttatgactatatccttatattaaattcttctaacatactttcttgcaagcaaactgcatagtattaggctacatttcagaaagtatcgtacaaagcatttcacatttttaaatgaatcatataggatatattaatatacattgtgacatttacactatagttcccttaaggatatgacttcatactttact

SEQ ID NO: 54164 - DNA, 637 bp, Mus musculus
  source 1..637: mol_type = other DNA
agcaaaaattccccattgctaactataggtaattctacatgttccaagtgaagacctagaggataaacaagtactgtagatttctgaaatatttgattgttactgaaaatttatacacaacaccaatctctgttgtagtgtatagaaattcaaaatgtaactgggcaaaaatagtctttcctttaggaattgtaaagcacgattttcatattgtatagagtccatctgcacaagtgtagactttttggaaggtccattttctattatatatttgattaattttcaaagatttctcttctagttctgtactcacaatagtagaatagagttttaaattgatttaactgcacagtattaggctaagattaaaaacatatcttaaaatgcatgtcacattggttaaatgggtcatatagggtatatggactttatctactagtactatggtactaggccaaaatcattacttataaatgatagtatagagtgacttctctcactctgaaagtaatgctcaattaataaacatagcatatcctgaccttaagagtaagcttattagtttaggatcaggccaaatgggaagaatcattggttgagatgatgctcctccttcaaactaactgtataaaaagct

SEQ ID NO: 54165 - DNA, 638 bp, Mus musculus
  source 1..638: mol_type = other DNA
aagcaaaaatttcccattgctaactataggtaattctacatgttccaagtgaagacctagaggataaataagtactgtagatttctgaaatatttgattgttactgaaaatttatacacaacaccaatctctgttgtagtgtatagaaattcaaaatgtaactgggcaaaaatagtctttcctttaggaattgtaaagcacgattttcatattgtatagagtccatctgcacaagtgtagactttttggaaggtccattttctattatatatttgattaattttcaaagatttctcttctagttctgtactcacaatagtagaatagagttttaaattgatttaactgcacagtattaggctaagattaaaaacatatcttaaaatgcatgtcacattggttaaatgggtcatatagggtatatggactttatctactagtactatggtactaggccaaaatcattacttataaatgatagtatagagtgacttctctcactctgaaagtaatgctcaattaataaacatagcatatcctgaccttaagagtaagcttattagtttaggatcaggccaaatgggaagaatcattggttgagatgatgctcctccttcaaactaactgtataaaaagct

SEQ ID NO: 54166 - DNA, 691 bp, Mus musculus
  source 1..691: mol_type = other DNA
attaacagtcccatttcaagactatttgttaatttatacagcaaaattgcttgctaggtatccaaaagaacattctgataactagcatttggtaaaagtcaaaagtagattgtgtgaataacagcttacatttttccacaaaagcttttctaatattatccaaccatgggtaaaatatttaagaaaaattcaatatattcattatccaaagacattaaatttcactattttacacatcaaaaaatcataaactttgcaaataaaaaaatctaaatgtcatttaaaaacaatgctttattaaggatgaagggtatcaaatttgatactctgttctttgaaacagattaataaaattttcataagtggtatatttgataaaggaatttaatccataacacaaacaattgtcaaaattcaatgaaatatgtcttataatcaatacaaactaaacaggtaaacaagttgaacacatggtaaaccagttacaagtcagcatatggacatgttcaatatcattgaccacatttaaggtctgaccatacctcatgttaggaatatgtggaagtattgaagttctcctataatgagtatcatatacaagtgtggtagaatagaatagaaagaactgtggccatagaactccttcttgttcatcaatgaagaatttctagtttcctagcaacaaagcatc

SEQ ID NO: 54167 - DNA, 244 bp, Mus musculus
  source 1..244: mol_type = other DNA
tgaccttgaattagaagtcttttagtgttcaaattataaacacccaccgaagactttaaaaataggacttatttgacaactggatcacgtaacctgggctatatacagaggagcctacttttaagaaaaaaaactgttttgaagggaattcaggttcaagttagtgcaaatttgctcccagggcagcttcaagcaaggtttgcacctcttttctagctgggctccagctcaatggcctagcaca

SEQ ID NO: 54168 - DNA, 384 bp, Mus musculus
  source 1..384: mol_type = other DNA
ttatatactgataaacataaaataaaatgaaagtacatttgactttacaaagcactggtagaaaaaaaaacaatgtattgctgtagaatttttatgattttaatattttttttaataaagagagactatgtaacaaaaaaaaaaatttgagtcaggctgatctacataatgaggcaatgccctgctcttcagaaaaggacagattcatcatcagtaatcatgtagtagagtacatgcgttcttaaattttattctccatgtcactcggaaaaatgctttttcataagtcagaaaatctagtattgttgaaatgaaagtatgtgtatacaaagaagtgaatacgtccacccctagtccagtggagcaatgaagtaaatttagttt

SEQ ID NO: 54169 - DNA, 438 bp, Mus musculus
  source 1..438: mol_type = other DNA
tttctaaagcctctataatcagagtatagtgcacgtgcagattcttgggcaatgctccagatattgcagattatggaataataaatcataggatttatttcatttctttaaattttaattatatagagtttgagaatggatctattccttagaattgtgagaaaaaagaaagcaaaatattttcattaaagtcacaaagaacttattgcataccatggatagacttgtttatttactcatctctattgataaattttatattaatccaatagtttgaccttacaaaatttcagtcaaatgtggctgccttaataagcacatcattttcactaagcttccactttgaaaccctgccaggtgtaaattattttcaaattgttttgcgcatgcgcaagcttcttggtcccgcccacgcgcacgtgggattccaaccgttgg

SEQ ID NO: 54170 - DNA, 347 bp, Mus musculus
  source 1..347: mol_type = other DNA
taaataatgtgtatattactaatcctatttttcaaaactaaacttagaaataaagatgatcatctatatatgggaagtcatttaagcaaaaatgaccatacctcataaaatcataatctcaatctttcacctgtttataataaaatttgcacaaaggggtaaatgacaaaaacaaataaatatatcagtatgctttgtagatgatatccatcactatcgtggaacacttaatacagtttctgaagggatacagtaactagtcaaaattttgcttggccgtgtttactttgtaagttactacagaatgactcttgagtcctagcctgttcagcagggctatttagaaa

SEQ ID NO: 54171 - DNA, 415 bp, Mus musculus
  source 1..415: mol_type = other DNA
atgttgtacagactctaaaagaccatagacaccatttcagactattgtacatagcaaagtattcagccctggtcaccagggctgccatttgcagtggcaaagtggagattgttgccatcaacgaccccttcattgaccgccgagaatgggaagcttgtcatcaacgggaagcccatcaccatctaacatgtgtcttcaccaccatggagaaggccggggcccacttgaagggtggagccaggtcatcatctccgccccttggccaaggtcatccatgacaactttggcattgtggaagggctcatgaccacagtccatgcctggcgtgatggccgtggggctgcccagaacatcatccctgcatccactggtgctgccaaggctgcagagctgaacgggaagctcactggcatgg

SEQ ID NO: 54172 - DNA, 270 bp, Mus musculus
  source 1..270: mol_type = other DNA
tgtgaaatcataatgatgatatccataagatagtatttcatgcactttgtgaatgaggacttagtataaatgtgtgtcctgagctataacacttatgggcatatgttcatagcagctttattcataaagaatggataaatcaaatatggcacatttatttacaaaatggagtattacccaacctgagaccaacaaaaactaggactttttcctccttgctcggaggggaattccttctcatgcaaataaagcattcccagcatggctgtt

SEQ ID NO: 54173 - DNA, 361 bp, Mus musculus
  source 1..361: mol_type = other DNA
atcacagcttcttatctcaggccctgtagtagattcagatctagctgaacaatagggctagctttatgcttagggtttctctgtagccaccaatgcctcttcagaggagagcaaaggctgttttcagattgagaatcccctccttccacaacctcattccggatgtgaatccctgttccctaggcccgtggacagggcgagggagcgaccccggagcaaccgcggtccggctggctgcacgggagccagagccttccgccgtccgggtgcagaccctcagtctctctcctaaggcgccgcctcccgcagcctggggcggggctggggcggagccaggttggccgcgccagggaggagcagg

SEQ ID NO: 54174 - DNA, 613 bp, Mus musculus
  source 1..613: mol_type = other DNA
aaaagataataaaataatttggtttaactgacatagaatcatgattttttttttcagaaattggtgagtccacaaagagaaaactacatgttcactggtttatatttttcagtatttacttatctgtgtatttatttttcttatatttaaatatatttatttaaaatatgtatgccaatggaaactcctaatactgtaaaaaaattattttgggggtccaggcttgaagatctttcttaaggccatcattatctacaatgtggctacttaaagaaattctgtcttaaaataaataaataaaacaaaaaaattttcatttaatttaaaataaatagaggaatattgtttggacaaaataaattatcaattagcccctctagaaaaatatttcttaatgagtaatcctcttctttcatattgttgctaggaaaaaaactttagtaactttatgccactttatgactaagatattggaagctgaaagttatattaagtataaataaatccaattctaatcatttactggtgctacatgatggaattaaattttaaaagaaacacataaaataaccatataaaatacttttatttatattactctatttcttaatgg

SEQ ID NO: 54175 - DNA, 577 bp, Mus musculus
  source 1..577: mol_type = other DNA
aaatctggcaaatcctctcttaaagattttttttaataaaaacatgtaacattttctgtagcataaatccagactatattaatgcttggaagttttacaattaaaaaaatgcatacattaaggacaattgtcacttcatctttaaaattgtgattaatgaatagtagtttctaaagacattgttttttcttctaaaattcattgaatctcatttcctacttgcttcttccccttaggagaagccttatgtgcaaaatagccaatatgttcttgaaaaaatcctctcactaggcaagtttcatttgaaaaagtaagtcttgtattttatactaaaacagaggaaaataagttaaaaacagtctaattttctctaaaaatgatatgatgtgtggctaaaaactctccttttagtataattaggaaaagaatctaatccaaaggctttgtatctgtaccggagcaagcagatactgaaagagattcgcagatcctctgttttttttttgtggttaccacaccgacgttgtggcagagaatcatgttaggcatgcccacctaaccttggaattcaaataga

SEQ ID NO: 54176 - DNA, 596 bp, Mus musculus
  source 1..596: mol_type = other DNA
gaagatgattataatggtaaaataaatatctttctaacagtgttaccaaagtatttaaaatatattgatcttacctgatacataaataatgaagatgaataaaggaattatttacaaacatcctggatgacgtatcacacttctgtccattaatattacaggttttttgagggaaccattaactagtcactatctcaatatttcatagaattgtttgaataattattacagcagaatttgaggaagaatacatttcttgtaaagtagtcttaatagtattctactcagaagaggactctctattttagcagaaaccttgtctccaaagttttactcaccttagcatacataattttgattggatcccaagggtaaaaattaattttggtagacatcattttttttgaagtctagtagaatagaatgcaaaagacagttaatagctaattcttgatccagattttctgtttattagttttggaaattaacaaagttactaaaaatattgtgacagcattgtactgatgagttttctgttggatgtgactcagaacacagttgaaccagtcctggtcctggaatttgaaatatccaga

SEQ ID NO: 54177 - DNA, 229 bp, Mus musculus
  source 1..229: mol_type = other DNA
aaatctgttacactgtgttaaaaaaaatgtgttaaaaatgtgttaaaaaaatgtattataatatttgaacctcaaaggatcctagaggtacctacgtatatgattgacatagctaccgatagtcaaatatatcagtgttacttgggaacttagagaatcaaatgctctattgtgtgttctaacatagttgttgaaggggaagcctcctactaaaactagacagtggaac

SEQ ID NO: 54178 - DNA, 352 bp, Mus musculus
  source 1..352: mol_type = other DNA
cctatctgattaaattccatgctgcaggaaactcatgaataattttctactatattttctgattttgaaatccagctatctactttggctgccaaaaatagtgacaagcaacattcattgtgcatttaaagtgactgtggctggaaacatgagccacttctaatttttttcagtcacacagatcaattcaatttgtcggagcttcagaatgaatttttaaatttgttgaacagaagtgtacaaagcctccattcattgtgtaggcagataaccacatatataaaatgaatttataatgtctctgccttattatggcaaagtgataagaaaagttggctgtttaatataaact

SEQ ID NO: 54179 - DNA, 456 bp, Mus musculus
  source 1..456: mol_type = other DNA
tatactggaaagagagatccttccagattttttctaacacttcaagataaaaacaccagtgctgctaggctctgagtctttactctaggacattttaagaatcagtgctataatatcaaaggttgtttcttaagaatccagggtagccgggtattgtggtgtacattcaagaccagcctggtctgatctacgagaccctgtctcaaaaaataaataaataaagattcatagactcaggataagtttgattttttttcctacttctttaattttcagttgaggaatgattattttttcctttcattttctaaaaagaaaacgccaagccacctaggtcatttatttaggcaacaagtagccttgccagaagtccctggctatccaggtccttaggtgggggaggagcccttcccagccccgccccgtctgtcccgcccgcccgccagcccgccagcc

SEQ ID NO: 54180 - DNA, 360 bp, Mus musculus
  source 1..360: mol_type = other DNA
atttttgtttcaaattataagttgtgagagcttggagtataatactgaagattcagtgttctggagacttctgtgctagagaatttgggacacagtgttgcaaatcatttgaggtcttcaaatacttttagcaccatattgacactctgaaatcatttctgcttttacttgtgagtctccatctataggtaagcctttcaatagactttgccatcaatttatttaccctctgaagattaaaaagacatcatatttcaataatattctgtgttttttaaagaacctcaaactctcaaattatatatggaagggtccatcctattgtgatcatccctgggttctatgttctataagaaagca

SEQ ID NO: 54181 - DNA, 362 bp, Mus musculus
  source 1..362: mol_type = other DNA
gcagaacactctattactctagaacactctgttgtctaaagattttttttatcttaagtattttaaaagttttcacaagacagctggtgacttcaacagacggagccagcgataaattttacgtattttaaaattattttattgtatattttcttttatttattattatgtgtatgtgtatacagttgagaatcatttttaacgagaaaatgatgattaagtgatattcaaataatttcctttaagtaacaaacatacttgggtgttaatccacaaatttaaaagatattatagaccgccaagcctttgcggtgactggccagagccaggaactgatagtctctctcctccctctccagaag

SEQ ID NO: 54182 - DNA, 396 bp, Mus musculus
  source 1..396: mol_type = other DNA
ccagaatgatatatctaaaaacatctcagaccaatatttgtgtgtataggaaattgaacaatacttatttgactctatgaatcaaaagaaaaaaatactaagttgttttgggatgccaagccttaagagatgcatctccggagcgctttactgggtttgcgcaggcgcactaaactcccccagtgcgggggcggggcccagctcggacctgggcgagccctcgcggcggggaggagggaggctttcctgtggggaccccgccctctggttcccgtggggaaagcctcgcgagggcccggggtctggcgagcgaaggcgcccgacggaagccctgaagccggcagctctttggcccaacctctcccagagaccggatccaggaggcaagggggcggc

SEQ ID NO: 54183 - DNA, 469 bp, Mus musculus
  source 1..469: mol_type = other DNA
tttcagaactttgttcatgagtaagataaattttaagagaggccagcctggtctacagagtgagttccaggacagccagggctagaaaaaaccaaaaaaaaaaaaaagttttataatagggtttttggtgtatgtacatattcagtatttagatacagggttttctttgtgtcagtcacaaaacgaatgttttgagtaataaacattaagccctccattcaatgcctggaatcccagtcagagtgaatgaatgaaaattagaaaatatattgttttagtatgtattcttgattattttgataagcttttcaacttcatttaaaaatcatttaaaatattattatatgaggtaaacactcatacatctcttaaaaagcaagcatttttacaaattaaatacaatgccagtctgttttaaataccatgtgcatgcctggtacccatgcagcctggaactggagttacagat

SEQ ID NO: 54184 - DNA, 291 bp, Mus musculus
  source 1..291: mol_type = other DNA
tgttttgaaaactatttctcaaaagtttgaaagccttttagaacgcaaatgagaatcccaattcgccctcaggtcgcactctgcacagcctaccagagagggaagaggcagctctgcttcgggttgctccacagctgaggccccgccctccactaagcccgagtttggctaaaggcagacgcccgcgcggaccagagcccccgccgtgcgttgaccccgcttgccacgcctcccaaggcctaggagaatgcaggtcggggcggggcctgcggggcgacgcggccgggtgcc

SEQ ID NO: 54185 - DNA, 480 bp, Mus musculus
  source 1..480: mol_type = other DNA
taggctatcaacatcattgtggttgagcttcaattaggctgaagttaagcattcttgatgtgctaccaaagcacacagagatctatccttaggtctgctttcatgcctgtactaaagctgaactgagtgggccaagtcagtaacatcatgaaaaactcacacagaaagtcaattgctggtctctgagttcttgttgtaccactcatgttctttatattctttaaagtattattattatggaagccctgactgatctggaacttcaggaagatcatctcccttgcctcagcccactcatggactacaatgagaaacaatgctttgaaaattatagattattaataatcaggatagagagtttttaaaagtcatgtataactgttttcttttttttttttttgaaaaaaacacaagacagtttcacagataggtttcatttttcaaaaaaagaggaagactgtgactagacttaagtgaaac

SEQ ID NO: 54186 - DNA, 402 bp, Mus musculus
  source 1..402: mol_type = other DNA
gtttgttaaagattttgaaatacttgtgtctttcggaaaatgcaaattttatgtatcattctgtacatacacatgacaccaaagacaactttatacaatatatgttttgtgtgtgtgttgaactgtccatttatggtgtcatattggcagtaaagatcattaaaacattggaggatatttgatttaggatttttttattagaaattcttaacattacctgaagttcaatgaaaggctttcagcctgaaactctacttatcataattaagataataacaaatctcttcacaaataacaatttatttttgagagagaagcgtctcccacatcagatggatgaatctgacatgtgcgactctgaaaaatcacacattacagactgtcactgcgagtagcaagaga

SEQ ID NO: 54187 - DNA, 576 bp, Mus musculus
  source 1..576: mol_type = other DNA
actcttaaaagaattgtctagctgtacaaaagtcatatagttgactagagagagccccccctggtctcttgtccaggcgacgtatcagtgtcctgcttctacacgagtatgagaagttctcaacattgtcagaagtcagctacaagtacatgttgtttgcagcccccagctcctcgatccagcatccaggacacagtaggtgaatgatcaaattaaagatttattatgaccagctcccaccaatgttttttttaaatataaggtgcatttgcatgaaaggcatttatggatctacactttacaaatcttagaaaatgagaactcactcttctaacattatacaaaacgcaacttataaacactgtgattattctacaaaagtttataaagctgtcatagaaatggactttaagcatttctttccccaataaaggaaataagttagctcttctcttccccaggtagactctctgagctttcgaggtcatggccacacacattcaagcacaaaggcgcgtccccctctgcgcccttgtccaagaggaggaggcggacgcgcttgcgtgcgcattcagc

SEQ ID NO: 54188 - DNA, 313 bp, Mus musculus
  source 1..313: mol_type = other DNA
gtctaaaggctggactccatggttattagtaatcatttagagaaaagtctttttttcatgtaagggttacatttcttaaatatttaaacttaaaaggactcctcatatattttcttataatcactggggactcctctgctgctgtcaagagcaaagattctagatcatctatctgattattattacatttgtactttttacaacaaggccttcctgtccttgaataagtcaagctctgtcatgaaattaatgtttcccatcaataagttctgccacaaatattaattcacagagaattcttaatatgcattaa

SEQ ID NO: 54189 - DNA, 339 bp, Mus musculus
  source 1..339: mol_type = other DNA
gaagattttgcctttgcaaaaactgtccttcaggaaagattccacctgagactctgagctcagctgcctagaaaaatgcaatcacaatatgtccaattggctgggccacttttggtcttctgaaaactaaaactcgcaaagcggtggctgtctgtggattggctagtactaaaatatccattgggtggcagtaatactatcctctttatgacttgctgcaaaccagagaatgcattcaatcaaatgaaccgatcttgtagaaacactggaatcatttatgcattgccaggattagcatcattcaagataattttgaaaaatcatttttggtactgtaca

SEQ ID NO: 54190 - DNA, 426 bp, Mus musculus
  source 1..426: mol_type = other DNA
aataagcatgtgcatataaataaataaataaataaataaataaataaataaataaagtaccttttcctgttcttgattaaaacagagcattatcttgtcttaaatggaacaaatcattttcatatcaatatcattcaagttgattacataagaaaacattgaattcctactggtgcagtagttttatgaacattagaaaaataagatctggatgccaaagctgctgctcgagtacctgggacccccctgggataaccttgaaccagtgccctagtgagggggcactggccatggcccttgacctttgctgctagtgaactggagtgctgccctccccgaggagggtcgtccgcaaaagggtccctttgggaacctctcaggagggggacccgggtcaggggcgaccagcatcttgctccttctgga

SEQ ID NO: 54191 - DNA, 423 bp, Mus musculus
  source 1..423: mol_type = other DNA
gaaaaaaactaagtatcaatactaaatcttagtagcatagctgatggccagcctgtaaagttctataattttaaaaaacaaacagaaaaaagtaaatattttaaatgtcaattttcatttttagcaaattttcatttacttcctttttgacacagttctcaataacaaagttcatgattagaaatatttgagaaaatgtttcacctactgtaatatgtaggaataaaacattgatatttctttttgcttaaggacataagaaccacatttctaacttttgagaaaaaaagacatgttatagaaagcacatatagtactttctatgcttccatttttaaagtaagggaggcaggtccctttaacagtatctattacataagcacattctttttagaaagaatcttgggacaatcacaatattct

SEQ ID NO: 54192 - DNA, 392 bp, Mus musculus
  source 1..392: mol_type = other DNA
cactattagaactcatgtctctagatgtatatatagcataagatggcctagttggcaatcattggtagacaggacccttggtctagcaaatttccccagtacatagcatttgaaatgtcaatgaagaaaatattaaacaaaaatgtcagttttgaatgccaaattcaccaggtagtaacatattcattcattaatatattctttttgttttcatttatggggtgattcacatatacaatgatacttcaataattttggtagaatgtagaattaaatgtggaaggtataatatgccaaaatctagctaagtattaataactactgccacatgtgcaatagtctcttggaaatgttcccaaaaaaacggtgctttgtgatgtcaatgcagctct

SEQ ID NO: 54193 - DNA, 413 bp, Mus musculus
  source 1..413: mol_type = other DNA
atcatggagcttatacccactggtctgaggcccctggcacatatgtagatttggccttaaaatgatttatagcctaaaatgtcagttttgaatgctaaattcaccaggtagtaagatattcattcatgaatatattcttgttttcatttatggggtgattcacatatacaatgatacttcaataattttggtagaatgtggaattaaatttggaagatataatattccaaaatctagctaaccacatgttctatcacacttgaagatggggatatagagacacgagtgtcttggagatcttcgaaaaaaaccttgagtctgtatccaggcctgctcccatcaggcagcaaggtgctttgtgatgtcacagcagctcctcagccactattagctgagaaggaccttgctgacaa

SEQ ID NO: 54194 - DNA, 374 bp, Mus musculus
  source 1..374: mol_type = other DNA
actgagactttcactgaaattttaatttagagaagatgcacatgctaagatctcagtaattactatataagaactagcctcacaggctgttacaaatattaaaaatgagtactctgctatgtaccagccctggcttactggataagctgcagccaagcttgaaaatgactaactcctactatcctactagttgtattttctttaaaggattcacgatacagtagactttgcaataatagatcaagtagaaagaggaagtttcaagtttttatattaacaatgctgtgttgaaattgaaaaaaaatagcattcaaggtaacctgaattcttgtaatattcctgatatttcatattcctgatctgctacatctgta

SEQ ID NO: 54195 - DNA, 458 bp, Mus musculus
  source 1..458: mol_type = other DNA
cgcgcgcgcgcgcgcacataaaatagtttctgattcatatatttgactaagtatgtagcagaggagggggcaccttctcatgtaagtaaaataatttaaaaaaaactattacaccatcagttttgaatgctaaattcaccaggtaggaagatactcattcatagattcattctttttgttttcatttatgggatgattcacatatacaatgatacttcaatgattttctaagaatttgaaattaaatttggaagatataatatgccaaaatctagctaagtgtcccactgccacatgttctatcacacttgaagatgggaagagacacgagtgtcttggagatgttcgaaaaaaaccttgagtctgtatccagccacaccctagtgcctgctcccatcaggcagcaaggtgctttgtgatgtcacagcagctcctcagccactattagctgagatggt

SEQ ID NO: 54196 - DNA, 330 bp, Mus musculus
  source 1..330: mol_type = other DNA
cccaccaaccacctcgagatgtaaatgattttaaaaactaactgtcagttttgaatgctaaattcaccaggtaggaaaatatttattcatgaatgtattctttttgttttcatttatggggtgactcccatatacaatgatacttcaataatttttggtagaatgtggaattaaatttggaaggtataatatgccaaaatctagctaaatattaaaagtctcttggagatgttcgaaaaaaaccgcctgctcccatcaggcagcaaggtgctttgtgatgtcacagcagctcctcagccactattagctgagaaggaccttgctgaccaa

SEQ ID NO: 54197 - DNA, 330 bp, Mus musculus
  source 1..330: mol_type = other DNA
aggtcacaggattcaaaatgttaggtcccttctgtcctaggaaactgagaatcacacttctgcagtgcaaggggtttcatacgccaggcgctgccagggggtgacagccaaagagactcccccagtcttgttcccagtctctgtatttaaggaccttttcacagtccagagttaaaacaagacactgtcctaggaggataatgtcggcattgggtatcaaagtttgaaagtagttagttcagctgctactttgccggcaggcctacgcagcccggcctctgtcgagagcagagagcgcctctcagcacgtggagcagagagacaccagag

SEQ ID NO: 54198 - DNA, 420 bp, Mus musculus
  source 1..420: mol_type = other DNA
tcaaaagcctaagacaacattcatttaccattgaacttctttggcttcaaacttagaagttcattttgggctcaaagttaagtgttattttttgtcaacaactgtcttaaaagaactaagcaaataaaacaaatccaaaacacacaagttattttgttactttttcaattgtatcacatcaggagtgagtcatgaagtaagattgttacataattgagagacaatttatagcacttcttttcccagaaaatatctctcgtgaccagagaaccaaatagcgtgcatgcgcttgtcgctcaggggtcatcacagggcgccaaatgcactcccgcgggaaggccgggggcggggcgcggctcagcgccgcacgtcagtggccttccgggcggaagtccgcagtcttccaggccgctgattggc

SEQ ID NO: 54199 - DNA, 388 bp, Mus musculus
  source 1..388: mol_type = other DNA
cagtagcactttggtataaccagatcttaacagaacctgtttcgttatactggttgttagcattcagtctaatacctaacagccaggtaggccatataaaaggggctgcttatattctacactctattgtatgtggctggtccctcagggggaagggatacctcagcatgggcctgcagagatctttttataaacacatcactggtaaggatatcactccttacaaaaaataaaatgattattagagtcaattaaagatatatgtgtgtgtaaatgctttattttctcacctatattttcctatttaaagagagttggttctttttaatctttggggaaaagaaagaaaatgtttgtcattccatagttaattcaccaatggaatttg

SEQ ID NO: 54200 - DNA, 486 bp, Mus musculus
  source 1..486: mol_type = other DNA
gcaatttccttacttagaacgtgaatctgctttgggttcttatgaagattagaagatctaagtaaagtacttggcactgcacctgtgcttaacaaatactagtgattttatttcttactaatattagacatggcaagaacaaacacttttgcaagttctttccttggaatgtgtgtcttcagactcctcttacactgatgttttaggataatgtaaacactaaggcacatcactgtggtgagtctaggccctatactataggatatagtgggaggcaggctgtcaaagacaacctacccaggccttaggcatctgtcagtgttcctgtcttatgcagtccagaagatgatcagaagccagtgggcaattgaccttcctatttagcaaatgttctgactacaactgcattaaatgctcatgccagggaatggtccttgcaggccagccaatgggccccggccgctcccaggtggagtgtatccgcac

SEQ ID NO: 54201 - DNA, 464 bp, Mus musculus
  source 1..464: mol_type = other DNA
cctggactcactttgtagaccaggctggcctcgaactcagaaatctgccaatatttgttactaatcccgacaacgttcatggaaaccaagtgttaatgaccttcgtttgtaatggattccgtaacaatactgttttgtaacaatcctgtatatactgaacttccacttaattctgtaattaattgttggacagcagatctgaggagggccttccggaagaggggcctcgggttggggaggtctactcggagcacttctcaagacttgatccggggcgggacctgcaggaacggagctggctggtaccagcccgagacaggcggcggcggcagccaatcagcagcgcgcgcgtgcagccgcgtaccccttagcgcccctcacatcccacgcgcgccgcgtacgtgcggcggcagatcccgcctttttcaggcggggcttgggaagccgcgggcagccggccacgg

SEQ ID NO: 54202 - DNA, 487 bp, Mus musculus
  source 1..487: mol_type = other DNA
tttgaaatgtaaataaataaagaaaatgtctaataaaaagtaaataaataaataaaaataattcaggcctgtgttttgataaagcagttttattgttgtctgtccctcaggagaaaaatcattaaaaggaaatattaattttcctttgtactgacattaaataattcatatttcccttaatttacaacacaatcaccttatttcagagttagaaaattgttcagattatatttatggaagagaatcttaaaaataataataataatgttcaggtgagaacttgggaatgttaactttagcaagccatcagatgatccctatgttcagccttttcctcggatgcaaagggcctgagagattttagactctttactttgaggggtactcatccaaagcaggcctgaaggggcggatctgtgccggccttagaaccgcccctccaggcctgaggaggggcgagggaggtcacagcctgaaggtgtatcag

SEQ ID NO: 54203 - DNA, 682 bp, Mus musculus
  source 1..682: mol_type = other DNA
agagacttaagaattttatttaaaaaaatctcgataattgtagagtgttatagcattattacatacataaaagttatgatccatagacttccagtgtaacacacgtgtagtttctatatttggcttcccgacagaaagcttatttattaaaaaaaaaattaccgggtttggttgttattctacaccattcaaattggcaaggccattttcattttgttaaatttatcttcatccccaggcaccaccgcacacacacacatttacggcgggaggggggtctgcgggcctgcaaacaactcgagccaccgcctcaggccgggaccctcgcggagaggcggtaggtgtccccgaaggcccccggggggtggccgcggcccacaaacatggtggggggtggcccgggcctcccgcctctcgacggtgtcggtgggccacggcctcgtgcggattttacagccgaggcggcggcggcggcgcgtgtgtggcggcggtggcggaaactcgggccgccggagaccccgccgcagcgaggccactgggctccccggttgcggggcgtgaagggcgccaacccggggcgtcagcgggacccaccgggcggaggagggggcccagctacccttccgcccccggcggtgacgtgacgtgctgacggcgggcccgtgccggggagctgggcccc

SEQ ID NO: 54204 - DNA, 659 bp, Mus musculus
  source 1..659: mol_type = other DNA
gttcagccttgtctacaaagttaagtttcaggacagctaggactactcagagaaaccctggagaaaaacacaaaactcctatttttaagtttataaatattttgttgaatcagatactttcacttctttatcttcttaaagtttaagagacttaagaattttatttaaaaaaatctcgataattgtagagtgttatagcattattacatacataaaagttatgatccatagacttccagtgtaacacacgtgtagtttctatatttggcttcccgacagaaagcttatttattaaaaaaaaaattaccgggtttggttgttattctacaccattcaaattggcaaggccattttcattttgttaaatttatcttcatccccaggcaccaccgcacacacacacatttacggcgggaggggggtctgcgggcctgcaaacaactcgagccaccgcctcaggccgggaccctcgcggagaggcggtaggtgtccccgaaggcccccggggggtggccgcggcccacaaacatggtggggggtggcccgggcctcccgcctctcgacggtgtcggtgggccacggcctcgtgcggattttacagccgaggcggcggcggcggcgcgtgtgtggcggcggtggcggaaactcgggccgccgga

SEQ ID NO: 54205 - DNA, 410 bp, Mus musculus
  source 1..410: mol_type = other DNA
taagaactatgtccttagccttaattttaagacagcgtccttattaaacatcacttatttttaacacaagaggaaaaataagatgtcgaaatttctctaggtcggagaggactggactcttcctccaccccagatctccgcgcgagggcgctctgtgcgagctcgctggggaccgctccggtcgagcgtggccagcctagcacgcggtgcggtccagagctccggcaagcgagctgatatagctctatcgctttagtagattatagaaatggggaaaaaaagagacatttctgatttcggaaatgatttctccgttctgagctggaggggcctttctggggctgccggatacgttctgaacagtgctgcattcgccccttcgctccgcccaaggggcctacggtatgtca

SEQ ID NO: 54206 - DNA, 269 bp, Mus musculus
  source 1..269: mol_type = other DNA
atccacacacacacacacacacagagagagagaggggggggggatgagggggagagagagagagacccccccgccccgccccgggccaggttctgaaaccatgacagctgtgacccggctccacattctcaccttgaacatgtcgctggcagccgcggctccggcagggtcacccctccctctgcgccgctaggtggcgtgtcgcgttgcttagcaaccgagaggcgcgcgcgggaacctcctgcctccttgcaggctgttgctaggcg

SEQ ID NO: 54207 - DNA, 677 bp, Mus musculus
  source 1..677: mol_type = other DNA
tctctgggaaatttgcatgtgaaacatgtaatttgcatgcggacgcaatgattcattgcaaattgccttataaaaaatgattgccattcacttttataacaggtacctttgcaagatgcaaaaatggaattttccaggtttcctagcttgcgcactgtgtgttcgctgcagcgccacggggcccacctccgggccaggcggagtgaccctgctgcaggggtggaagtgcacggccgagtctctccagcctcgacggcagggctctgagggtcaacctcagcggatccctcctcagtagcaggcccgcctctggggcaaggcgcgcagctggcgtgggaccacaccggctcccgttccgtggcgccggaagtgacgcgcctggcgttcaaccagggggaaggtaaacacccgccaggcggcgcgccggcccccacggggcgccttcaggggctaagggggcctcccaggcctgctccctaacccaagtccccgccctctctcggggacaggctcggctctgcgtcctcgagaccctggcccgggcccctagcccgtgggccccgcccccctgggcgggccccgggcggctccctcggcccgcagggggcgcgaggcccggagcggcccctggctcgtggccctctcacgcccccacccccggcgtgggtgatcccgag

SEQ ID NO: 54208 - DNA, 511 bp, Mus musculus
  source 1..511: mol_type = other DNA
tcttccattttctgtcgaattaggacagaaacgaaatatggtcctagccttagatttttcacagccttgaaaaatgtattaattttctcgcaaatagccaaatactgccattttacgtctacaagtattaaatgggaccaatatttgattgtcagatttacactttagtactttaaaaagaaaaacaccggtaccggtcattttttcacaagtaagcgacatgttacatttagtttaaacgtaaaacttaaggaccgttcagcgcaaggtaaattctttaagggaaaaaccttttatgaggtaaacgtccgtcgggcgccaccgcctggctgcctcagcgtgcaggattctcaaccctcgcagccggagcctggcagtggaggcgaaagccagtccccggcgcggcagggagccgggttttgccgcctagcaacagcctgcaaggaggcaggaggttcccgcgcgcgcctctcggttgctaagcaacgcgacacgccacctagcggcgcag

SEQ ID NO: 54209 - DNA, 316 bp, Mus musculus
  source 1..316: mol_type = other DNA
acactcaggaaaatccaggcccctcatggatggttttgtttgtccaagtctcagagttgcacagctggcctggaactcagggctttccctgagtccccagagtgctgggattaccagcctgcgcagcggtgctggggaactcattttctcagcagaggcctagcatgtttcgaaataagagacccccgcggggggcctacctacggggctctgcacacgggggtgggccgcaaccgttggcggtgggatagtgtgctggcaaggaggcgggctctcctccaagtgcacatgtgctgcgcatgcgcggcgcgtccag

SEQ ID NO: 54210 - DNA, 425 bp, Mus musculus
  source 1..425: mol_type = other DNA
gttattgggttgatttaaaacaaatgccttaaacaagtacatccaggatttagataaaatatcaaccatttttgagggtgatagtctattaatgagaactataaaggattttctacactttagaggccatagtggctttaatgcaaactcagttcaaacctgctactgtccggatacttgcatataaaatgattagaataattgttaaaaattgctttccttggtaatttaaaaagaccattaaccccatccttaaagcctctcgatttcaaattaattcgtgattttaagttgcaattactatcttgattcattctatagcttaatcattggaacgtggtcaaatcattctgtcagattgtgtgaaccaaaataaatagaaaatctcgtgtttttttctttttcttttcttctcagcctctgac

SEQ ID NO: 54211 - DNA, 144 bp, Mus musculus
  source 1..144: mol_type = other DNA
gacaaatgtgagtactagaagttacttgcacacacatgaagttactgtgagctctcaggcttgtgtgtgcacacaatttcctgcaacacactgctacagagtgagactctgcctctgtgttcgcatatttaaatcacttcgggc

SEQ ID NO: 54212 - DNA, 144 bp, Mus musculus; identical to SEQ ID NO: 54211
  source 1..144: mol_type = other DNA

SEQ ID NO: 54213 - DNA, 439 bp, Mus musculus
  source 1..439: mol_type = other DNA
gattctagaataaaccatcttttattttgagatgagagctgtgttctttatgttcacatatggaaccattaaaaattgtttccagcctggttcgaggccagcctggtatgtagagtgagttccaggacagtcagggctacccagggaaaacaaatcatgtttccagcatatttaatcatgacagaaactgttgctctcaaatgcataaggttatagaaagatatattaataagaaatcagcttaataaacattttgatgtttgtgctttttatttcactcagttttagaaaagcaaataccagcatattttccttccacttagaaaaacatacactggtggactgtgcacgcttcaaatttcttaaaaaagaaagaaattgtagatttgtttatacaatttttccgcagcagacacctgtgtgtcagtgtggctgcccc

SEQ ID NO: 54214 - DNA, 240 bp, Mus musculus
  source 1..240: mol_type = other DNA
ttattttctgggaagcttaagtccccatgcaacatgagtattcgtagatggcaagttcttgaaaagtttatatacaacaactatttaaattgttaacaagttggacaacacggtcagtggcctgcaatttagttttaggcagtggccaaagacaattgcttcctattgactattggctcccgaagagagagccgactctgtgagcgttgtccgggcactgaatgcgcagctgcagcatct

SEQ ID NO: 54215 - DNA, 277 bp, Mus musculus
  source 1..277: mol_type = other DNA
accatgaaaaatggtcagtttctgttgataaacatttttttctcttattggaacatttagactaacttccatattactgaagatctccttttatttttctgtacaatgaggataatagttaggatcttaatattaagagactgtcccaacagactttccgctgagtcaacataagtggcagctgccttaccctccttggaggaagacaaaggcagctcccccctgggaagctgcagggtggagggaggcggagtgggcgctgggactctcgcttcct

SEQ ID NO: 54216 - DNA, 470 bp, Mus musculus
  source 1..470: mol_type = other DNA
ggctgtcctggaacaggcatgcctctgcctcccgagtgctgggactattgaaatagtatactctaaaaacagttattttcctagggaagaaaagtgaaagtataggtctatattccaaatatgtcccagttactggcagtctaagtaacggaggtgaaggcagcactgatggttgacctcaatcttgccttccctaagagcctggggcaagcagaggcaggtcactttcctgacaggtgatttcctctctgggaagaccagccacctggcacagctagtctcgaactgagttccaagagtctggcaagtcccatttgggcgggactagctccgtgtgtagccacgctgaaacccgccccgcgtgggagcggaagtagggagtccctgcaaggggttcgacaacctctccgccgggcgagggcatgccttccagccgtcatgattggactgtatgcctgccaatcatatca

SEQ ID NO: 54217 - DNA, 306 bp, Mus musculus
  source 1..306: mol_type = other DNA
gacaatgtgatgggaatgtcatagtcatttataaaaagtaccatacataaatttctatctaaggaatgatttaaaattgatgatgtagctatttgtaaaaacgagttttgtgctatttccatcatttaaaagtaatcagagagagagaaattatacacctgtgatttttctataagacagcaagatttgcttaagtattagaaaagatgatcgagagctcattccaggatgaattttcttcactctatcgataatggggtgatattattgctcagagcacttatctgagtgtccactcagagtaga

SEQ ID NO: 54218 - DNA, 392 bp, Mus musculus
  source 1..392: mol_type = other DNA
agccaaagaaaacattctaaaatatttttaaaatgtgtctacaatctatcttttcggaaaactcttagttttaaaaacatattaacattcattgactggcaaccagaaggaaagaggtccttcctccaactcggttttttcaatgtcaaagctacaaatccctaggtagcatctagaaaatttgacatctaggaacaaggcattctgtaataaatgatttcttaatttcgagaaaattttctccattttgccgcacattggtagcaaatacatcctttgcttataatctttgacataattatcagtgacatattgatttaaagtgcgctacaggaactggaacaggaattctagaggcacccgggttgcctggctggccccggaactgtgga

SEQ ID NO: 54219 - DNA, 484 bp, Mus musculus
  source 1..484: mol_type = other DNA
aaatatgcacatactatttatacattgtattatgttcagaattaattacatgtttttgtcttataattacacattacagaaaagttaattttaaatgacacaaaatgttttatgtataaccattgtttaaatgtcagtttttagtactagtcttttaacattaatgagtagttttggaaagatcactgacagatttcttttccagatgaaaatagaaaatgtatgtaggcattttatacacttcaatctgagaatgtgtaaaacctatctaccagactactctcagagtgatgagccattgcaaatagctcctttttcacagtaggttatgtatgttaagtgcttcacgtactttttctctaagtattcagagtactgtgttttataaagatcactctggttccgagaccgcggctccagtggtccctggcgggggtggggcgcatgcgcgcggttgcagaaacggcgatccaggcgccgcggt

SEQ ID NO: 54220 - DNA, 699 bp, Mus musculus
  source 1..699: mol_type = other DNA
tatttgaaatactattacatctaaaggaaaagaatttaactgtcataaacatatgggaaaatgatattttgttttgcaagtgctgttaaggacttgatcattaaattctggaataaagtttgagatttttaataagttttcattttttagattttcactcagtgaacatcactgtggtgttgcttgaagcagaatatctagaagcatgagacactggatctggttgctggtaaccagtgaaacagttattactgaagtctagggatttcctgagaaggcttcatagaaaagtgacactttttcttcaaattgtaggctaacatttatcataaatttattagattaactaaaggagaaaaggattatttatagcagttaactttcttgacatgagcaaacttttctatgctatattttaatttaataacaaattaaatactaattactttataatatacatgttatacaagttagttttaaaataatcatcctattttggcacacataagaatgttttctaaaaagatacaaataattaagttcccatactttataaatgtacatatttcactgaatagtaaatcacagctatagtcaaagtgttttatataaaactggtacaataaacacgaccttgtattattaatattccccaaaggttatttccagatacattctatgagcaaaatgaattttgat

SEQ ID NO: 54221 - DNA, 450 bp, Mus musculus
  source 1..450: mol_type = other DNA
acttatatatactatatcatctgcaaaaagtgatattttgactgctaggacttcaagtacaatctttccaagttttgtcaaatgctttctcagcatctaacgagaatatcataatggattatgttgatggatttccgtatattaaaccagtaggaagatattttcatgaatatattctttttgttttcatctacaggatgattcacatatacaatgatacttcaatgattttggaagaatgttgaattaaatttggaaggtataatatgccaaaatctagctaagtgttatgttctatcacaactgaagatgggaacatgactctcttggagatgtttgaaaaaaacctcccagtctgccctagtgcctgctcccaccaggcagcaaggtgctttgtgatgtcagagcagctcctcagccactattagctgagaaggaccttgctaccaa

SEQ ID NO: 54222 - DNA, 241 bp, Mus musculus
  source 1..241: mol_type = other DNA
atttatttatttatttatttatttatttatttattttatgtatatgagtacacactgtagctgtacatatagttgtgcgaagagaagatttatttactattattataaataagtacactgtagctgtcttcagacatcagtgctcttaccgctatttaacatataagatagtgttttgtaacgcttccggcagcgagcggtgccagaattccgtgtgtcccacgtccaattggctaatcag

SEQ ID NO: 54223 - DNA, 227 bp, Mus musculus
  source 1..227: mol_type = other DNA
tgtatagaaccggtgtcagacatctgcaatctaggctaaataatgagtttagactcaggagctgctatggacagtgtggccccccagtcaagctctggctcagactgggggcggtggggagttttggccccgagcctggccccccacgtggccagagtagcctctctgggctgggccgggctgggcggggcgatgcccgaagccgcgggcaggctggcgggagggcg

SEQ ID NO: 54224 - DNA, 422 bp, Mus musculus
  source 1..422: mol_type = other DNA
gccaggcactggcatagcctatacctttaaattatatggtcttcaagaagaattgggtcccacccagctgtgacctggtattaaaaaaccaaaaacttctacattgtctattcattactcttttaaaacttttctataggtgattctttatttcaggaaagaagtaaaagtgcatgttaacaaaataagattaacacaggcttggtggaaattgtgtggtatcaaatttcagatttgccacaaatttgcttccatttttacattttgacaatagattttcattagataaatagctctgatatttaaagattccctcaattgctctagggaaacttccttgcttcataggcagaacacaaaggaaacttgtacttcctgctttccgagcagtaggggctattgctgcattagcaactactcct

SEQ ID NO: 54225 - DNA, 447 bp, Mus musculus
  source 1..447: mol_type = other DNA
aattactgtttcaattctgttaaataaattatctatcatctatcttatatgtttaattttaaagcacattttagtcacttttatttatgtacaggggatcaaatacagagtactgtctatgaaagcttgtatgcacacatgtactatcatacctggctatagccacaatttttgagtatttgttaggtaacaaacactaaattaatggctttatatgcattattacatattcttgccatgattggacataaactcatttatttaaggttaatggtagaggtagaattcaaatccagttttaaaaatcaacgacagaatgatgacaattttttcctgaaacacccaggatccccgtttttgtcatttgtctcacacttagggtaagatataatcaccctatttttttcttgacaagctgagttggacactctgtgtggtagagtgtca

SEQ ID NO: 54226 - DNA, 434 bp, Mus musculus
  source 1..434: mol_type = other DNA
caagagtaagttcactaatactcattttagtacagtgtctgaatgaataaaagatattgtatagataatgtggcttgatcatttttaatttacaacacacaattaccaagtctcatcatgttcatgttacaacagaaagctatcagaagggttttatttttctaaggcctagaattaaaactttcaatctaataaagcattcccttattaagtctaacaaactacaaataaggcttatctttctctttaaaaaaataaaatatagatgtctttacaaaggcatcatgaggaatactctaataaaacaatttctgagtgcactaaactcatactatgaagcactcgagtgcctctaattcacacagtgtccatttgtagtaaaacatccctctatggtaaactttgaaggaacagtttcacccatccttaaatct

SEQ ID NO: 54227 - DNA, 204 bp, Mus musculus
  source 1..204: mol_type = other DNA
aaaggacccagatatagctgtctcttgtgagactatgccagggcctagcaaatggacttatgaggaaaatacctaattcccctgcatggagcatctagcagccccagacctgctcttgggtgtggcaggctgccccttttctgccagaccagaggggctgggggcatcccagcagggggaggactatcccttcagcagaccaag

SEQ ID NO: 54228 - DNA, 512 bp, Mus musculus
  source 1..512: mol_type = other DNA
tttaaaatactttacttcaccagctctaatgtaatatctttaataaaaattaaggcaagtgttctattggatgttcacacatataattttattttatttcttataatttttctataaaacactgtttcacagagagtaaaacttatatttggaaggatacttttacaactttgccttatattgaaatggcaaaactgtgatttcaatcaaggttgcaacatatttcaaatattaatgctcataaaaaaatccattttataattgtttttgctgttgaaataagatagattttataagctatactatagttttgaaaagttatactacatagaaactatctattctaaaaaaataaaatatatattaagtaattccttacattcaagtatgggcagctgcttaaaaatatgttgcaagtgactcccaaggatttgtgtgagaggtgttaaccacttccacactcagagaaatttgtgaataaatattataataaatccagctgctgcttaagt

SEQ ID NO: 54229 - DNA, 455 bp, Mus musculus
  source 1..455: mol_type = other DNA
tttcttataatttttctataaaacactgtttcacagagagtaaaacttatatttggaaggatacttttacaactttgccttatattgaaatggcaaaactgtgatttcaatcaaggttgcaacatatttcaaatattaatgctcataaaaaaatccattttataattgtttttgctgttgaaataagatagattttataagctatactatagttttgaaaagttatactacatagaaactatctattctaaaaaaataaaatatatattaagtaattccttacattcaagtatgggcagctgcttaaaaatatgttgcaagtgactcccaaggatttgtgtgagaggtgttaaccacttccacactcagagaaatttgtgaataaatattataataaatccagctgctgcttaagtttgcagggcagctcctcagtggctgactagccttaaaac

SEQ ID NO: 54230 - DNA, 391 bp, Mus musculus
  source 1..391: mol_type = other DNA
ttgcagggcagctcctcagtggctgactagccttaaaactactccaggtgcttcaggttcggggcctgctctcagtggagatctccccaattatcatcttaccagtagaaatagcccctctcaacaggtttaaaagtgaatggcttcatatctgccttaagaccctcatcatggctccagaagacctaggacgtaggtcctacttagtccagtgacttttcactgccttttctttgcagaagagacagaacagtttaaatcttaagagatcttcgtggcattactattgtcactgtcattatttggctggccacaccaaagatgcatgagatcctcaccaggatttggaaaacacccggatattgttaaagaaccaccccgggttttgtac

SEQ ID NO: 54231 - DNA, 326 bp, Mus musculus
  source 1..326: mol_type = other DNA
ataagtaaatgacacactatgggtctcttcttctaacacctctgaaatgtaaatgtagctaaaaatttccaaaggaaaggctatctagttctagagtagattttagcagcatcgatatgcaaataccctttagacagttgactaatctgacacagtctagtttccaaaagtgtaaaccacatctgtgcagggctgtgtcacagctagccggagtgacaaagactttgccagcctctcagactccccagcccagaaggacagggcgggggttgagtcgaggctccccattggctccagcgcgggcccctggactttctataaagggc

SEQ ID NO: 54232 - DNA, 424 bp, Mus musculus
  source 1..424: mol_type = other DNA
accacaagtggttcgaataatgttttctaaagtgacctgggaattttatgccaggaaactcctctgctttccttctcctaagggggaaaaatgcacaatggttttgcaaaagctcatgcatagttcttatgtcacatacgttgtttggcaccaccctaagtatactctaaggcagctttcttggttttttttcttaaatctaactaccaagttaccttgcataggttatgttaattacattctggttgatatactgagagtatttagatttttttttaattttttatttattttttattttttaaaaacagtaatgtatctggtagggtacaggcaaagtctcgcgcaaagctctgccagtcctcgcggggccccgccccctattgcttagggcactacccagtcccactgacgcgggggagtg

SEQ ID NO: 54233 - DNA, 398 bp, Mus musculus
  source 1..398: mol_type = other DNA
caaagtatatgaatgtatgtatgtattcatgtatgtatgtatgaatatttgtatgcatgtatgtatttatattcaaaatacacatgtatatcactaaattctactcattagtgagactttaagaaagtgttggaagagcatatatatatagtgtctgtatgtgtgtaccataggatggcttaaattcagagtgaagtataggattcagtttattttctgttaaaactcttaaacttctgaaggtattaatataaaaaaagtagcttctcctgacttttggctttctctggaaccccaagcctctaaatcatgtacatgaactttaaaaaaagctgcattgcttcagttcctggagctttagtaaccagacacgggcggggtttatttgcataaccact

SEQ ID NO: 54234 - DNA, 347 bp, Mus musculus
  source 1..347: mol_type = other DNA
gtcccgtccatcaaaagaaagatcatccctctgtgattcctctaccaaaggtaagggttttcaagtgcaaacaatttagacatctaaaggattctatacaaacaacgctttggacaaaatcaaaggttcgcatgtctgaagaaataaaacgtataaattaccaccatgggcttcttgggcccagaattcccagatcaaatggctgtcaggaattcccggtttcagcaagagttgctttgactgcaggagcaattggtagctggtacagagtcggaaaagcccggttccgaaaaacaagtggtatttaggctgcgctagcttggccggcctgcgggggcgggaccgac

SEQ ID NO: 54235 - DNA, 335 bp, Mus musculus
  source 1..335: mol_type = other DNA
ttcagagccacttcgaactggttctcaagcgctgctagtctcagcggatccacagtgctacgccgaggctctgtgccgcaggccaccgctggctgcgttcagataggttcagctgtgcgctgctgggctcggctgcattcggctgtgatccgtcggcggtgcccgctgtgcacggctgggctctgggctcggctgcgttcggctgtgagccggttcggctaagttcggctgtgcattgctgggcttggctgaacgctactgggctccgctaagtttagcaggagcctctgggcgctgtgcgttgccgggctctgctgtgtccggctaggttcggc

SEQ ID NO: 54236 - DNA, 337 bp, Mus musculus
  source 1..337: mol_type = other DNA
ccaacactgagtttgaggccagcctggacactaccgagtgagttccaggacagccagggctacacagagaaacccttcaacacaggtagcttagctattattactgttttactgatataatttaatgtaaacactgctgcaaatatagtttgcctaactgcagccactcttaatttgagagctgtgaacaaaaggccttttggataaacagaaagacaatttatagtaacttcattttaggttctccattaacagacagcaaatcacatgctgtagttattagcctgaccattgatttgggtcacagaaaccactctgccaccctgggatggagtcc

SEQ ID NO: 54237 - DNA, 443 bp, Mus musculus
  source 1..443: mol_type = other DNA
ctgggctcggctgcgttcggctgtgagccggttcggctaagttcggctgtgcattgctgggcttggctgaacgctactgggctccgctaagtttagcaggagcctctgggcgctgtgcgttgccgggctctgctgtgtccggctaggttcggctgaatcacttggctcggctaagggctcgattgggttcagctgagcatcactgggctccattgagcctggggcaccgctgggcgagccggcgcttctagcctgcactctcagtgggcgtggaaggcggagcgccccctagagcaaataggctcgcgctcgagcctcggaggctaccggagcaccggaactcggctgggcgccgcagcagccagcctcaggcgccggcggtgacgccgtcttaacgcgaccgcgcgctgaccagccccggtctccacgtctcaggtttcgca

SEQ ID NO: 54238 - DNA, 371 bp, Mus musculus
  source 1..371: mol_type = other DNA
agtctaaagaccttagctccatgccattcatctactaggtatggagaaaataaccagtatacaagtcttggcacgagtactcaattcaacaatgaaatgaagattgtcaacttatgctgaaaacttcaaagttccatgtgtttctatatggaaatagagtaaattatcctggacaagtcactttagcatttagatttgaagcctgcatgcagtgccattcagaactcaatctttcaaagctctgccctgggccctgggtttttgcctccagctgagtgacctgagggaaaggcatggaggagctggctggcagagccccgcccaccccatttggaccgcttttggggaggaggctaggtgggcggagcacc

SEQ ID NO: 54239 - DNA, 259 bp, Mus musculus
  source 1..259: mol_type = other DNA
tggagaccagcagctttcccctgagtgccacagtccacggtggcaggatcctccggggcagtgccttggcccagttctgtgctaggccctcccagaacagaagagatagaagttcagcactagagtgttccactgtcctgggaagccacctggggaaggtggactgcacgaaaagagtcagacttatctaggactctggtcccagtcctgagaagaagagctttctcttacaggcaatgttgacaatcctagaagccac

SEQ ID NO: 54240 - DNA, 186 bp, Mus musculus
  source 1..186: mol_type = other DNA
ggagtccggaatctcagggcccagatgcctgcttttgttcagacaggactgacctctaatagtctaatagactcttgtcgtgggtgtttgtgtgtataaaaagaacacaaggacggtgccgggtgctgaccgggtgtgcagcagcgcgtggtatggggcatcgcctgagcaggagagtagaagctc

SEQ ID NO: 54241 - DNA, 361 bp, Mus musculus
  source 1..361: mol_type = other DNA
gaggtacctcttagctgtcacatcaaattttaggctagcctggaataaataatgaagagatctgccaacatgtgtagatgtgcatgcatgtctgcgctcaaaacacaggtacattgtttctatcagtgtctggtcttttgtgccaagaccctgggcagagatgaggccacagtactggcccttggcctctggccctgaggctccagagagacaggaggagacctgcttaggagggtgggctcctgctcccacccgtggccggacaatcaggcccaggcctcccaagttggcccatggccccactgggtggagggcagcaaatggccagtggcttgcctgctccttgggaggccagtgcctc

SEQ ID NO: 54242 - DNA, 395 bp, Mus musculus
  source 1..395: mol_type = other DNA
cttggttaaatgaggggtggagtaagagaccccagcattagccctggacccaggtaggtccctgaggccttgcctggcaaatggccaccattttgctttgaacatctctggagattcacaataaattcatttgtggtttacacaggattttaaatctgaattattactacaattgtattgtggtgggaaatctccctgccctgctcacaaggacctacctaggcaatttgtaagcttcttataagaccttgaactgcagttccattccctgtcaggcaagctctttcctagccttgatttgaggtcccggaactaagagagctctcaagatccacagctgggtctgagaaggttaaattcccagctggaagcattcagcgaagcttctaacttac

SEQ ID NO: 54243 - DNA, 473 bp, Mus musculus
  source 1..473: mol_type = other DNA
attcttgtaatagaaacgaatgattgattgattgattgattgattgattgatttttcaagaacgatattttaaaaatgtggtgcaattcacaacatgtgaacctgtaatgaacgatcatctcttgcatagacaagcctggttttgtgaggaacagcaccagatttcactgtaaacaccttctgtttgcctcaaacaccaggttttgaaccatagcatgtaacataggatgtgatatagtaaggtaattaactctcacgttagaattaatcagaatcttcgcattttattttattaaaaacaacaacaacaaaggtggcaaatgtttaacatttgttaatgcggttacctgaaaaatcacagcgtttcgaacgaaatcagccacccccgccacatcaagggggcggacgcgcgctgacgtcacaactacttccgccgccgcagtccccgcctgccctagtgctctttagcgggg

SEQ ID NO: 54244 - DNA, 531 bp, Mus musculus
  source 1..531: mol_type = other DNA
caagttcttccaaaacttgtgcagctctggaaaaagataaacttttgcctgagggttctctcacacggtactttctgcactgtgaaagggatcaatgcatatctgttgaatgaattactatatcaagaaatcccagactgtgccccaagactccattgaattgcaaacacagcaggcatggtttcattccaaaccctgaactgttttaattagtttaacgtctgttaaacgctttgaagattgaaagcatactggatgatgttattagcaactgcagttaattgcaaacatttctattaatgctagtcctcccccatagcggcgctgaagggttaagagctgggtggggctgccaggcagaggtgaacccccacgcccccaggccccgccccacggctggaggcccgagtggaacggcagggggcggggcagccaggcctggcgggcccgtggttgggcgtcccggccgccccttgaggcatggggcggggtaggtgaggacctcctccctcattcccggagtggagctgc

SEQ ID NO: 54245 - DNA, 296 bp, Mus musculus
  source 1..296: mol_type = other DNA
atttctaagttcgaggccagcctggtctacaaagtgagttccagggcagccagggctataaacaaacaaacaaacaaaaaagtatttacttatttttatgttcatgagtgttggtcaaaagaagctgttgtggtcctttataagaacaacaaattcttctaaacattttgcaaatattgagaatattactgtcctctcattcttagcagaagcaacaagtgctctgatttgtcatgatagacaacttttgcatagtatgtactaacatttttagaactactcagtaagaattttgc

SEQ ID NO: 54246 - DNA, 788 bp, Mus musculus
  source 1..788: mol_type = other DNA
agcggatggccagcgggagccacggggccatgcctttgggcggccgccacagcggggcgaagcagaggcgccgggcgtccgcgtccggcgtctgtggcgctgcggggagccaggtggcccgcccgagccggaactccgggagccgcgggtgcggagccagagcggagccggcccgggaccggccccagcggactgccagagcgcgagggaagcccgaagggccggcggcggaccggccggccggcctaggagggcacgagcgaggcggggagctgcacggagcgggcagcgggcagcgggcagcggagtggagcgcggcggggcccgcacggcggcgctgaggggcgcagagccgcgccgagccgagacgcgagccagggggccgggggcgcggagtgaagtggcgcggagcccggggtagcggaggggcccgacaccatgaggagtgcggcgccgccgccgcagccgccaccgccccagtgccccgcaccgccccccgccgggacgccgggctgcgcctagcgggccgggcggcggcgccccggctgccagcaggggagcgcgggaggggcgcggggacggcccgagagcgccccgccacaacggcctgagcggggccccgggccggccggcctgcctagccatgcggcccccgaggtaaagcctggacggcgctgaggagcgcggtgcggtgcgcagcccgccctcccgagacggccgtccggcctcgcgcctgcccagcccggacccccctgaaatatgttcaggggcgcttggatgtggcccgg

SEQ ID NO: 54247 - DNA, 191 bp, Mus musculus
  source 1..191: mol_type = other DNA
atcaaaatctgacctgtaatttacttttacaacacatctaaatttaagatagccatctagtatctgcaaagctgagctgatttccaaagagatcgctttatttttctatttttattctgtatgtgcaagttttcaaatgttcctgatcaaagagtcagagtactaggaacttgcaagaggaaacggttgcc

SEQ ID NO: 54248 - DNA, 218 bp, Mus musculus
  source 1..218: mol_type = other DNA
agtatcattcaatagataataactggaaaaaaataccttggtatgcttgaattttctgccttccaacattagttttcaaacagtggaggagtggagtggccactggagcagaagcaaatgtggcacctcgttcgtactattcagctttgcagaacttctaggtaaggtgaacaaagccattctttctcatattagatagtctaatatgcatcctgctc

SEQ ID NO: 54249 - DNA, 482 bp, Mus musculus
  source 1..482: mol_type = other DNA
ggttaagagcactgactgctctttggtggctcacaaccatctgtaatgggatccgatgccgtcttctggtgtgtgtctgaagacagcgacagtgtgctcatataaccagtgaatcttgtttagaactaagatcttctcctatgtattgaatattagctgttgttagagaatctttacatctgttaaggaaaacatctgaaattttccacctccataatgaaggatttagtgatggactggcacagggtcacacagttactgtaaacaattatgccaaaatgttaacaattgggtttgctgctgctgctgctgctgctgctgttcaaacaatacttaatgaaagtataaagttgaaattgtgtttcactttctacttttgtgtacatgcagaaaagtatgagactatctgccacttagactggatgacagtcaggcagggctagacctgtgggcaggccccagtgctactgaacaggcctctg

SEQ ID NO: 54250 - DNA, 435 bp, Mus musculus
  source 1..435: mol_type = other DNA
aaacaacaaattcttcttcattatcttctttattataacagtgatcatatcctatatatttttattgattgattattcactagaagtgaactaccagggcaggaaatgtttgttatcatacttatgaagtcattgatatcagagtttggtccatggaagacttgtgtgggttcaagtctttattttaccacaaatcatcaaaacacgctttaattttctcatcattaattaggacagtaatagagcctattaggtctagataaacatttgctataattaaatacacacagatgattatcagtagtttacattttcaaaagaaacttatatgatcttcctgtaatttaattatagaatgtctccttgtgtacacaatcattttgaagctgttaaacagtaatcttgggtcccagtttccctccaagggtttttcta

SEQ ID NO: 54251 - DNA, 156 bp, Mus musculus
  source 1..156: mol_type = other DNA
gcagtaactgtcagagcttacatgtgcactcgtgcagataatgtaggtcccactaatctacacattcagaggattgtggaggccagcttagcaaccagagctggaggctgatgcgagcttcatctatcttctttaggaggagagaaggaaagcacc

SEQ ID NO: 54252 - DNA, 139 bp, Mus musculus
  source 1..139: mol_type = other DNA
aggaccaagggcctctcctcccattgatgactgtaggccatcctctgctacataggtgggcagtaactgtcagagcttacatgtgcactcgtgcagataatgtaggtcccactaatctacacattcagaggattgtgga

SEQ ID NO: 54253 - DNA, 213 bp, Mus musculus
  source 1..213: mol_type = other DNA
cttttgtaaaagatttatcactcagctgtggaggaagccactccagactcgcctccaccagctcagcaggtgtccgtgctgggtgaagccggctctcccaggagcccccggaggctggcaggagtgggagagctcggaactcgcgggggttcaaattggcgccagccaatcggagcgcgtacaggctccgccccggcagggtggtaggagcat

SEQ ID NO: 54254 - DNA, 285 bp, Mus musculus
  source 1..285: mol_type = other DNA
tcccagtggaggactaggtgacccgctggccctccctggcttcctgccagcaagcagccttgcttttaattctgagagagttagagaatctctgtcattgccaaatagagcctagagagccagtctccctcactggataaaattgagtgtgtggagggggaggtgtaaggagtcattaaagtcacttcaattcctaggaagcttgaggttagacttccttatccactcaagagtttctaggggactggcagggccccttctggcctcctagagccaggacccctc

SEQ ID NO: 54255 - DNA, 283 bp, Mus musculus
  source 1..283: mol_type = other DNA
ttctgcaagaagtcaccagtgggtcactgttgctcagaattcacctaaacctcatgcttggccattcctttatgggactaaaagacaaaaaaattaattttttaagcactctaatggcatgtttgcatttctctcccatagggattccgtctacacgggctaccttctagatccaggtcctgtcagcgacagccaattcggcgtcggaaccggaagcggatgctcctaccaccctgccggggcggagcctgtacgcgctccgattggctggcgccaatttgaa

SEQ ID NO: 54256 - DNA, 245 bp, Mus musculus
  source 1..245: mol_type = other DNA
gatgactctgtctcaaaaaaaaaaaaagattctttctgtcttatgattacgaggagaagtcaaggagacctccttcaatcgggattcctgggtgctgtgccagaaccaaagaattggcttcttggactagcttagagcaagtgcaactccctcttgccagtggggcggggtggacaggatcatcacctagctctgctcctttaagaagccgctgtttagctcctgctgctgccgctgccgctgcg

SEQ ID NO: 54257 - DNA, 205 bp, Mus musculus
  source 1..205: mol_type = other DNA
agagagccagtctccctcactggataaaattgagtgtgtggagggggaggtgtaaggagtcattaaagtcacttcaattcctaggaagcttgaggttagacttccttatccactcaagagtttctaggggactggcagggccccttctggcctcctagagccaggacccctcgattcctgtaggtggcaacagtgacacctgttt

SEQ ID NO: 54258 - DNA, 210 bp, Mus musculus
  source 1..210: mol_type = other DNA
tttttctttagtccaaataactattaggcttcagagatgtaagggattattattattattaatcacacctctagtcatgcattccttgacataagccataattccagcctgggttatcttggggcagtggagagcaaggtcacctaccctgctccacctcaggaggaagactttaccaggtaagatctggggcccttctctgacttcaga

SEQ ID NO: 54259 - DNA, 261 bp, Mus musculus
  source 1..261: mol_type = other DNA
ctggccagtcagtcaccattgtggtgctaagatcttgcagatgaggaatgcagtactgcaggaagcctgtagtgggaagaaatccgatttcctaaccctccgcagggggagtgcaaacaaaggtgtttgattggctcggaggcgcgccccagcctgccagccagctggacaaccttggtgcgccgagcgcggcctccagccgtacgccccgccctctgacccaggcggagggcgacgggcgcccctcctcccctctcgcct

SEQ ID NO: 54260 - DNA, 286 bp, Mus musculus
  source 1..286: mol_type = other DNA
cagtttgaaacactgagcagcgcttcctttaagggcagtgcacttggttttatccaatatagagaatctagacaggattatcgaactcgggaccccacatctgcagcccaggtactagcaagaagaaacagacatttgaacatacttttttttttctttctggcagggtttctctgtatagccctggctgtcctggaacaccaggctggcccagcgccaacagagcgtgactcattctgtctgcacgcactgagtgaccacagagcgtgactctctggtaaagcgt

SEQ ID NO: 54261 - DNA, 204 bp, Mus musculus
  source 1..204: mol_type = other DNA
tgtcttttgaccaccagagaggcaaatggttaaaggctattgcgtgtgtgtgtgcccgcgtgtacacaagcgagtgtgaaagacccccgaagggagaccctcccggcatgctggggtcgagactcttttaaaaccataaattttcttaactgattgatccaggaggtatatgaacctaacaggttgctagtgattttcaacccc

SEQ ID NO: 54262 - DNA, 343 bp, Mus musculus
  source 1..343: mol_type = other DNA
ggataaatgtaagactttgtcttagtatgtacataacatgtgcaaatacattttacacgtatgtaaatatgttcttctgtagatgttctcatgcagacacatactttcatgagaggtttaaagatcagcaacctgaaaagtgagaacatgaaatctttattgtttacgcaattcgtgttaaaagtagtaagcctgccctatcaccttaggataatggcagtgcccactggggctgctaccagtaccacccggaagacgcttgcattatagagtaccagccctagtctgcatgcgggcggtgtgtgcgtgcgcgcatgcgtgcgcgcgtgcgcgccgccgtcgt

SEQ ID NO: 54263 - DNA, 248 bp, Mus musculus
  source 1..248: mol_type = other DNA
agactgtctgtgaaatgtacatagaaaatggagagagtgcaccataaccaatgaacactgtttgttgttacacattcacttttttcttagtgaaggatgggaaaatctagcgtctttcaaaacgatcttttgggcgaccccgaattttaaaaaaagagtccgggacgacctctaatcattaagatatcggacgagaactcagtttcccaagtggctcctgaggcgcgtgcgcagatggctgccccagc

SEQ ID NO: 54264 - DNA, 166 bp, Mus musculus
  source 1..166: mol_type = other DNA
ccccccaaaggaggggccctaggagaggggcctggaggttctccttgcagcctgcatgatggaacctcaaagtcctatagtcctaagtgccaggttggcctccaagagttggggttactgggaaataaagtttttaaccaatgatcatcaagaatgtctgatcttt

SEQ ID NO: 54265 - DNA, 248 bp, Mus musculus
  source 1..248: mol_type = other DNA
ttgtcttatgttctcagaacataagcactgtaccgagcacatattaaagactcaataaatgttggctggataggaagtctgaagttagtactagttagtactgctctcccatcttagaagccggctctcactagggtggagaactttgacagatgccttcctggacctagggtcctgaaggtgttgatcaagtattaatcttgacagaacacaaatctccctggggacttagcttatgtcatctaagg

SEQ ID NO: 54266 - DNA, 350 bp, Mus musculus
  source 1..350: mol_type = other DNA
aaccctgtggtgtagaccaggctggccttcagttcatacatggacttggctgtgtaaaccaggctggccttcctggagagattataagcacttcctgctagaccggatcttttgtatcagatcagaggtgctttcttaaaacaatagtagtttctaatctttacaactgtcctttgaagttattaactaaactaaaaattcccgagcacttattttaggcgagagagctcagcgccgcggctgccccctagggcccaaagctcccgggctgtggggctccgccccgcgccggcgaggccccacccactctgtattgtccgacggtacccagcgtccctcggcagtttccg

SEQ ID NO: 54267 - DNA, 327 bp, Mus musculus
  source 1..327: mol_type = other DNA
cagttcatacatggacttggctgtgtaaaccaggctggccttcctggagagattataagcacttcctgctagaccggatcttttgtatcagatcagaggtgctttcttaaaacaatagtagtttctaatctttacaactgtcctttgaagttattaactaaactaaaaattcccgagcacttattttaggcgagagagctcagcgccgcggctgccccctagggcccaaagctcccgggctgtggggctccgccccgcgccggcgaggccccacccactctgtattgtccgacggtacccagcgtccctcggcagtttccgacctcg

SEQ ID NO: 54268 - DNA, 351 bp, Mus musculus
  source 1..351: mol_type = other DNA
ctggagggtacccccaggttgggtgataactggagtatacccccaatctataattacaccctatcactgggaggtgtcagttatgcccttaaaagcaagtcatttttaaaaatatctcctcaagcacaactgaagcagtttttttcttggataggtgtattacatatagaaactagataaaatgacattgactggcaagaaactggatcttctccatacagtgccaagtttggatttgttttcctggaaaatcacctacctgtctgatggggattgggccatgccccaggacttgagccatcactggcacggaccgcgccccccccaccccgtgtccgggcacgcgcagcg

SEQ ID NO: 54269 - DNA, 275 bp, Mus musculus
  source 1..275: mol_type = other DNA
ccctagggcccaaagctcccgggctgtggggctccgccccgcgccggcgaggccccacccactctgtattgtccgacggtacccagcgtccctcggcagtttccgacctcgcctggccctgcaggcgcctcaggcggtacgggctgggcaagacccctgaagcggctgcggctggggcctcccgatgtgtttcccgcggggtccgggtcccagcagttcgaggagctcgtgggttcaggagcccctcagaaagttgttagggtacaacctcttct

SEQ ID NO: 54270 - DNA, 376 bp, Mus musculus
  source 1..376: mol_type = other DNA
ttaagagtcatgctggcttcccagtaagtatccagtaaaggcttatctgctgacttatctggcataactcagacttggccgagggaatctgaggccctggctcggctcaggtagccttcagtgtgtaatggttgacattctgtttacctaaatataatttctaagaaggttttatgattctgggatacaactagaattactgcagtctatctccagcccctagtttttagaggctgggatctagagaagatagcatgccccaaagtgggtctactgaaggccaagagttgggctcttttcctctgaagaactccagatccaaatccattgggacctcagggatcaatcaagctccggtcctgggcgtacctagtgg

SEQ ID NO: 54271 - DNA, 335 bp, Mus musculus
  source 1..335: mol_type = other DNA
ccctgggtggtcccattaacagatgagaaaagtcagtaactaacccaaggtcactttaggtaaagaccaggtgcccacctgctaagcccctggagagggcccctttagctcgctcgccttgatttttgtgttgtaaaatacaaagtgacatcaaattagctgtcttttctttttttggcaaaagcacaagaagtctgctgctcctagcttgataaactcggtaccctagtccagaggaccctgattccctggggtcctggcccccagagccattattctggtggggccatgtgttcacccacaaaggtcccattgtacagacactgggtataaag

SEQ ID NO: 54272 - DNA, 291 bp, Mus musculus
  source 1..291: mol_type = other DNA
ggattcagtaaccgttactgcataggcgttgtcactaagccagaaccatttacccataactacgactcttagacaggaccccaacagtcgcccggggggccgggccccggagaggtggggcttcggtggagagggggcgccgccttccccgggggcgggctccacggggccccgggcgggggctcacgctccatccccagtgacggggccactgggctgggagtctcgcgccgggggccggcgctgtctcgcgagccccctcctccagccagccaatgggattggtcgctg

SEQ ID NO: 54273 - DNA, 324 bp, Mus musculus
  source 1..324: mol_type = other DNA
gtatgaattaattactgaggattaactactggtgcctatattaaccttgtaatccttggttaagaaggttattattacctgataggcctcctatgggataaagagtaggtctggaaaaaaagaaacatggcggggcacatttttttttttcagtagcctaccacatagaatacaatgacattgttagtcagtgcatccttccgtagggccgggtgactctagtgcatgcgcataagctacgtttctcgggagataaactttgactggcagttcacatagccaatcgggaatccaacctcgggaggtaccgagctccgtcggctc

SEQ ID NO: 54274 - DNA, 159 bp, Mus musculus
  source 1..159: mol_type = other DNA
ctaagtccggtaagtgctgtgaggcctgaaagaacactaggattcagtaaccgttactgcataggcgttgtcactaagccagaaccatttacccataactacgactcttagacaggaccccaacagtcgcccggggggccgggccccggagaggtgggg

SEQ ID NO: 54275 - DNA, 413 bp, Mus musculus
  source 1..413: mol_type = other DNA
gacagggtttctctgtgtagccctggctgtcctggaactcactttgtagaccaggctggactactcagcgcctcattcctggcaaaataaggttattttttaagtacagatgcttttacacatttacacacatatatacatacatacacacacacatatatatgcatatatgtgtatgtatatatatatatatatatatacatatatatatatatatatatagtgctgggaatcatcttaaaaaaactatgaaaatgtttaatgtttgtgaatcttgaagtttcggttgctcattttactaagcttaacattttaccatgggaaaatgtaaattcatagtaatgttcctttggggaacggcacaaacaaaagccgcgcagttgatgggcgggactggtttgtttgaccaatca

SEQ ID NO: 54276 - DNA, 384 bp, Mus musculus
  source 1..384: mol_type = other DNA
atacgtacggttgtgttatatctcatatatgaccccttcatgtcctaaggaagacattttctcttagaggttttcattttagtatatcttaaaagaatcttgaggcctagttacttaggtcttcagtttggaaagttttctgagaaatggttattaaaatacatttgaacattttctgtgctgtttttttttctttaaaaaaaagggaggggagggtgatctttgacctttgaattgaaatattaaaacatcaggggctaggaccagtgctattggcactacctggaggtaatggcgggatttgtttctgagcagctgctgggatgtcagaggcttggaattggcaacatctaaaaggtggacgcctccgcagctaaaagcctt

SEQ ID NO: 54277 - DNA, 403 bp, Mus musculus
  source 1..403: mol_type = other DNA
tctgtttagaaggcaaaggaacacagtttgctttgttgaattgccttaatgattctgggtcacaattcaggatcaggaattttgaggaaaaaggcatcctctttaacagtggttgcttttgacatgcaaactcctagcatcaaacgattttgaattttagggttatatggttcaaatcgaacacatttgggttcactcagctcagggagactcatcaaagtacttaaattcatgggtggagtctgactctgaaacgcaaatattcgcgtttacttgcttaactaacacggtcgtgtaaactattgaatggagttaattaaacttttctagactaatcgacgggcgtttttgacagggttgtcgcatgccacatgtttgcgcggggtacttgattataacagaa

SEQ ID NO: 54278 - DNA, 316 bp, Mus musculus
  source 1..316: mol_type = other DNA
agaaagaaccgaccagcacacagtctaggtgtgattcagaagcagtccgtgcacctggtaacagggctgcccggatggaactccaacccatctgatctggacattaaatggacattccagatgactttgggctcattataatcccatcgtgatttcattcatatatatatatatatatatatatatatatatacatcaatgccaggtctgattcacatggcaggcatctcttggaaatgtcaaggagaaggtcccttcagttgagcttccctcctgcagtcactgaagacaagatgtaacatcaagaggctagccg

SEQ ID NO: 54279 - DNA, 527 bp, Mus musculus
  source 1..527: mol_type = other DNA
atggttaccctcatcatctgtgtcattgaatgtcatcactggtggccctgcctcgccccggacctctggggtgcctgaggccgcatgcttcttctgaatgctaatgggctcagcagcgatcccccaggcctcccgtcatccactggggtgccgggccgcccctcgcagccccaaccacgagtcgtactggggaggcctggagacctgaaggcacaccttctcctcggggccggggccggggccgtgtccccgcgggaatccatgggcaaaccggcccactttccggcccccaattggtcccccgaaaagaggcgctgtctgtctgtccgagggagacctgccgctgccaccgctgccgctgccgccgccgttcaccgcactgctggctacgcctgggcgaaggcaaccgtcacctccgccgcggctgcaggtgccatccgcttccgcgcgagacttcgcgactagccaccaaccagggcgcctattgttgggccgttcctcgaagccccatccaatagaggaaaggg

SEQ ID NO: 54280 - DNA, 280 bp, Mus musculus
  source 1..280: mol_type = other DNA
aatacactaaaggtactctactagagaaatcggggctgtctgcactgaaagcaccctcttctgggatactacaggagctcattgtgccccccaaaggaaacagatcggtgttcccttttggcacaaaatgcaaactgtcctggacagtcaaataagatacttaaactagatgcatgaagccagacttcgtgttgttcagtatttacaaagaaagttaagtttaaaaaacaccgggttaaggtactgggcctgaagctcctcaggaggacccgggcacatt

SEQ ID NO: 54281 - DNA, 411 bp, Mus musculus
  source 1..411: mol_type = other DNA
gatataagaactgacaagatattttgtacatttcgtctctgagagaaactcaaaggtacaagagatggcttttttttttttttctttgttttctggtgccagcatcccaaggcatggccattgagggagtctcccattttctccctttatggactactgaaccaaaaaggggctgcgcagctgcctctaaggaggctctggagattgagctgcgcctcgcgaagcagttcctctacactcgggggcctgcccgaggagaggaacggctgtcgccatgacgacctcgagtgggcagtcgctgtcgcattttcccgacccgagttagctgcagctagggagagcgcagccgcgggagccagtgggctccctcggttcccgaaggcccgcccctgcggggggcgcgcgtagctg

SEQ ID NO: 54282 - DNA, 301 bp, Mus musculus
  source 1..301: mol_type = other DNA
cccgatataagaactgacaagatattttgtacatttcgtctctgagagaaactcaaaggtacaagagatggcttttttttttttttctttgttttctggtgccagcatcccaaggcatggccattgagggagtctcccattttctccctttatggactactgaaccaaaaaggggctgcgcagctgcctctaaggaggctctggagattgagctgcgcctcgcgaagcagttcctctacactcgggggcctgcccgaggagaggaacggctgtcgccatgacgacctcgagtgggcagtcg

SEQ ID NO: 54283 - DNA, 352 bp, Mus musculus
  source 1..352: mol_type = other DNA
cttgctatcctgctgaacagcattaatgtagattatgttctccaggatatataactttaaaaaatcacattctacatcttggtctataatcttccttaaggtatttctgtacacacagcttataatcgttattttaaaattaatttaggtcatgacagacttctgcctgtcacaggcaatgggatgataggctttaaaaaaaaaattccatcttttgtgagaggacggaagaaggccattaagcccacgccaaagaactgcagtggcctgaggctcgggctgcgctatctctagctcctataggtcaaagaaccaaaggctatgcctgattctggaaccgcagcagaaatag

SEQ ID NO: 54284 - DNA, 316 bp, Mus musculus
  source 1..316: mol_type = other DNA
atgcacctcagctacttgtcctttttttacatttaattttttcatcatttcatatatgagtaatctgtagcaagctcagtctggactagatcttggtgccaggcactggagaaacaagcgcgcattttactcacgctactctagctaacgtagctagctagcgccagtgctcgagggcgcaggcgcaagaccttcctgggcggggctcaggaaaccgcgctcgagcgccagatcccggattggcccgccgcgaggcgggcagttggctctaccagtctagtgcgtgagcccagcctgggcgagcgaaattcaagcg

SEQ ID NO: 54285 - DNA, 457 bp, Mus musculus
  source 1..457: mol_type = other DNA
aaaatgtatatttcatttgcatatatatatatatatatatgaaaaagtgactcattcatacccctttcataatagctcttccacttacagtacaataaatgtcaaatgtgtcaggttcaagcagagagcctaccatctcaccctggatggctcagtgcctcagttggccaaacctttcgcttagagaaactttgtataagaaaagtatcgagtattaaaatgtatctttttatcactcagccatctaacagaactctccttgcgggcagttatctgtgtatccccagcactcaaaaaacagtttttgggagattctctcagcctcagtttcccagcctgggacctctgacctcccaccagcagatggcaagagagagtccccgcccgctgggaaagtctgaggctgggcggagcaacccaggctccagcgcgcgcgcagcctccgaccctttcttcg

SEQ ID NO: 54286 - DNA, 245 bp, Mus musculus
  source 1..245: mol_type = other DNA
cttggggagagcccacgtcaggttcgggctgtcacttgaaaaacaagtatagcccagtagctgcgtcgtgcccccagggctgagggacaggaggggacgcacgcactctgttcccttcccggcggcacagctgcagaagtgcgctgccgagctgcggtgaggaagctagctccgcccggctgctcctcccacaacctatcggcgcggggctgctcctggcagagaggacctgggattcctagccg

SEQ ID NO: 54287 - DNA, 239 bp, Mus musculus
  source 1..239: mol_type = other DNA
ctttcagtgaggattgtaagacaccttaccaacaacgtgcaagatgttattcttgctagatgtgaataattatataatcataataaaataaccgagttgcatgcatgcaccctgccctggatcttggggagagcccacgtcaggttcgggctgtcacttgaaaaacaagtatagcccagtagctgcgtcgtgcccccagggctgagggacaggaggggacgcacgcactctgttccctt

SEQ ID NO: 54288 - DNA, 334 bp, Mus musculus
  source 1..334: mol_type = other DNA
tttaaagcaagcttgtcttttaaagaagagcgttgtttagcttcagaagcagttttcccactacttgggagagaacccttgctttcagtccctgtctcagttttaggaaggtgacatctttcagacagtaaggttgcagcacgaaatttactctgtaaacagccttagcaccattagctaatgtagcaatgtatagtttacctctatttaaatatttaaatgatatttgcagtttgaaaacttaaaagagttcagactcttagcgccaaaacttgaaaccacgtttttttagtgttttgccatgaaaaaattgatcccaattggcagttatttg

SEQ ID NO: 54289 - DNA, 339 bp, Mus musculus
  source 1..339: mol_type = other DNA
gaacttgaaaggtcaagagacagtcttattctcttacccggcgctgagcgccctttggggaccgcctgccagaggcagattccttgaatgtcaggaagctttccaaagcagctccctaaccgctgcggattcgcgcatctttaaggaggagctaaagaactccttggtaaaatagtccttcagaatcccccgggggggcggggagagcacagcgcctcgggcgacacattctgggcggagggtggcgggctactggcccgtgggcgtagcgcgcagctgcaggacccacgccccgcccccgcacgctcgccaagggaggcggcacccggggcgctgacc

SEQ ID NO: 54290 - DNA, 233 bp, Mus musculus
  source 1..233: mol_type = other DNA
ttaaactggtaactttttttttcttttttaaagatttatttatttatttatttatttatttataaagtttgcaaatccaatgggactgttatgtgcaagacctgctgagagcaatctcctcagggcctcagggcgccatggcccgctacttctgtctgttcagccaggggaccttgtgttcaggctgctgggctgtccagaggtgcaggggccaggctagacactccacaccc

SEQ ID NO: 54291 - DNA, 214 bp, Mus musculus
  source 1..214: mol_type = other DNA
tcgaattcagaaatctgcatgcctctgacttcccaagtgctgtgcctacacaacaggcagttttgtctgtaggcactggccttagctctgaactgctgcactttggagaggtcaaaaggccactagagagcacaatcttggttttgctctagtaaggttagcctgccctagcctaccctacgctcgggcttcaaggcttggattctcgcgggag

SEQ ID NO: 54292 - DNA, 395 bp, Mus musculus
  source 1..395: mol_type = other DNA
aaattgaaagtctgccagcatttatttcaatccttgagagcaggggcctgcgctgccatagatcttgatcactgcgcatggccccaagggaggggctggcttggggccctcacctgcagagctctctgcaagcggcccctccaggaccttgtgggaggagcaggctatgtattatgtttctcacattctgaaaaagagagttaaggagtcccaacatggctgttgcccacgaccccatttggctactgtgatgtgcatctgcacagctggtcgaggtgctgaggacaagaagggccacctgccctggactgacagctgactccaggagttctctgcacagatctgctgagctgcccaccgtgctgggtgtggagtgtctagcctggcccctgcac

SEQ ID NO: 54293 - DNA, 250 bp, Mus musculus
  source 1..250: mol_type = other DNA
aatgttttcctctcccatcttcctgctgtaataagtgccagtactgacacacttcctcttctgaactgtagagaatgcataatgatagtaatagctcactccagaattaaactaatatggtagtatctagcgtctgtttttattcttgagatagaaaagtgtagtgagagtgtgtgcaccgtgcaccctgcaccccacaccatgtcgcctccaaatggaggccggttgcggaaccaccaccctccctcca

SEQ ID NO: 54294 - DNA, 457 bp, Mus musculus
  source 1..457: mol_type = other DNA
tttcacgaagtcaaagaaaatttgaaagtctgcgagcatttaagagcaggggcctgcgcagccgaagatcttgatcatcctaaaggagagagagaggcaggggctggctcagggccctcacctgaagaacttggacacgcgtgccagagctctctggaagcggcccctccaggaccttgcggaaggagcaggttatgtattatgtttctcacattctgaaaaagagagttaaggcctcactcagtcccaacatgcatttggctactgtgatgtgcatctacacagctggtcgaggtgctgaggacccaggttaaacctccgccccctggagggtcttcccaggaggcggaaagtaggggactaagtgacagctgactccaggagttctctgcacagatctgctgagctgcccaccgtgctgggtgtggagtgtctagcctggcccctgcactgctca

SEQ ID NO: 54295 - DNA, 262 bp, Mus musculus
  source 1..262: mol_type = other DNA
acaaaaattatatcaggaatgaaattttttttaaagcaaataagcctcaatggcatgagtcacagatctaagtttaaactggtaacttttaaaagctgtgcattcgcaagacctgctgagagcagcctcagggcgccatggcccgctacttctgtctgtggaaacccctcagaagggccactccagccaggggaccttgtgttcaggctgctgggctgtccagagtgagcagtgcaggggccaggctagacactccacaccc

SEQ ID NO: 54296 - DNA, 471 bp, Mus musculus
  source 1..471: mol_type = other DNA
agtgctaatatttttattatttccaataaacttcaaaatgtcaagcaaattctgtgattttaaaaaacaaaatagtactttatatttggtttttctttgtaattgggtttttaagacaaaatttcatgtagtccaagtctgattttccatctcagtgctgtgattacaggctaaaactgctcttttaccatcaggaaatattatgagaattttcccatttaaaatcacacaggttgtgaaaattacagaaaccagggtacagaatatttaaaccactgtcagttacatcatccaaaggccttcccagagcctcaggttataaccaaagggatagactaaagacaatccaagctcttttgaaattatgaacatatagtatcagttgaaaacggaatgaatgatactgcatttctgcaaaattccacaggctattcatctactaatttactggctcaggatttgtcaatcact

SEQ ID NO: 54297 - DNA, 298 bp, Mus musculus
  source 1..298: mol_type = other DNA
ttgcaagtctgctgtagctgccatggatttcaaactccatgagttcctgtcctttacactgacaatacattactatgaagttcagagtatgcacttgttagcatctaattaggtaaccttccatccaactggaatctaactttaggaagctagaagtatatccactatggatactgaatatacatttgtgaaacaaatatctatctgtccagagaaacaaagctctctttgcgcttctcagtctcattttgaagcaatgagaaatttcttccttcatttgaatgcaaatgctatgtaa

SEQ ID NO: 54298 - DNA, 399 bp, Mus musculus
  source 1..399: mol_type = other DNA
gctagttatttataagaaccacatggctgtttggctaaaagaacagagctttgggagtcagacgagactctggatttaaaagctcattgtcatttattagttccatgtctttggacaaattatttattctctttgtatatagacacccctcatagagcacttagcacagtctatgatgcttagccaaagtacaacgtaagaaattaatagaaagtttcctcctttgaaaaatgtttacccttttctcagaattgaacaatctctgcgtaagggaatgacatatgcgtaccttgagagggcaatgtcctaaactctctttatagaatttgctttatctgcataaaggcaaatctcgagaattccctggagttcacctctacccccttggaggcgcgcaag

SEQ ID NO: 54299 - DNA, 266 bp, Mus musculus
  source 1..266: mol_type = other DNA
agggtaggtactaccaaagtgtgctactttatggcgctgtaacagtctgtgagataaagtcaagctctgggaatcccagtatctgacacactgaagcagaaaagagtttttttccatgcccttagaggataggggtataaagtacaatgacattctcttatactacagttattctatacaagcagtaaaaagaagtccttaatacttttaccctagctgaaggaaaatgtagaggtcaatgttttctaagatgtgataaaaacttg

SEQ ID NO: 54300 - DNA, 436 bp, Mus musculus
  source 1..436: mol_type = other DNA
tgaattgctggcataagcaaaccaattttgtgtcctttattattcatctaaaggttagaacagactgtgaattatttgtcagcgtgacaacaatatcctttgattttctaataccctagtttgacagttaacaaaatttgacagttcttttaagttaatgagctattattccctcggcatttaggaattatttttcattactgctagcgagtaacgtgttgtccaagtagaagatatattgaaattttgcatagacaggtgacctaatgtacattatttaatgtttatgtggaagttctacataaacgtttttagctgtaaaataggataatccttcattatcgcgcaaaataatgaaattcacgcgtcactttattcattttaatttttttataatatagttagacctaaaggtccaataagatgtcagaaaggc

SEQ ID NO: 54301 - DNA, 595 bp, Mus musculus
  source 1..595: mol_type = other DNA
gcagtgatggcacaggccttcaatcccagcacttgctgtgagttcgaggccagcctggaataagtaggtaagtaagtaagtaagtaagtaaataaataaataaataaaaataagcaaacagataaagatatatgttctttgttcccgaattttatatttctgcttagcacagatacgatacttcttaattatatttttgactgtctaaaaaataaaatttcttttaaaatctttctttccaagtaaagctactacttgaatattgtaagaggttattacttcatgacttttacatcatatacatagaagatgaggtcacgttttctttatttctttacttattatttagaaaaacagtcataatctggccatctttttgggattacagatattcatcacaatattcatatataacaacacactcagctgaaggtagaattcttatttctacatattttagaccagattggatttaaattcagagttctggtgtgcgtgtgcctgtatgtgtgtgcgcacgcacatatctgtacgcatgcgcaaaatgtgtgtgtgtgtgtggcgcacgcgtgtgtgcatgtgtgtgtgttcatgc

SEQ ID NO: 54302 - DNA, 490 bp, Mus musculus
  source 1..490: mol_type = other DNA
agatggcaagtcaggcatggcagcccattcgtgtagtcctagtacactagtagtattggaggtacaagctaggctatttgaaaagccctcatttccacaaaaccaagttaagtttgcagcaataaactaactgtgttaaactgtgagtctcaggtagtacagggctgcacagctagtgaattaagctaacataacaaatatgcaaagggatttctttgtgatttaggaagtaatcaagttttcttgttacgtacccaagtagtgtaggcctcctgagtctgggactacaggcctgtaatattctacaggtcagaattcctgttagtaatgtgcatatatgtagccctagcactaaagtaaactaaattaaaataaaatagaaaagtgtggggcaagcccaaaggctttgtgatgtacgtggccattgaggccgtgtgcaaagctcattaacgtcacagaggcctgccaggagaggtagcctcggggcccg

SEQ ID NO: 54303 - DNA, 373 bp, Mus musculus
  source 1..373: mol_type = other DNA
ccatttcttgctctctggaacagagaagcaagcgtcccgccggggcatgggccgggcattcctggcccggcccctggcccagagtctgccctggccaagtctagacccggccctctgtggctcctctgggctccaggttggcgcaaacaactgcccggaggggcgggccccgctgcgcctcctcccctcagtcccgccagggatttgccgggaagcgcgggtgtgcccaccctctgtccagtccaagtgggacagggtctgtcacggaccagctctagtcttggtcccagaccaatctagctgcaagttgcttgaaagcaagagggaggcatcttccttatttaattcgtcttccaagccatctgaacaagac

SEQ ID NO: 54304 - DNA, 433 bp, Mus musculus
  source 1..433: mol_type = other DNA
acagctgtcccaggttgccttagcaaagccttcctcaagcattaaatacacacacacacatgcatttacttcgtgtgtgtgtgtgtgtgtgttatacatgtttgcctgtgtagagagatctgtgtagagagaagtatagcattggtgcaataggtaaaatgagaacttttttctttcttttttaaatggaagtgtagttctctggtggtaaccagtattggtaggaataggacaaggtataattctgtctttatcaaaaactaggggacatacccaggcctgtggtttgcagttatagcagctacagcaatgctggcagctaatcatctgcggaagcgaccgcggacagtcccggtcacgttgctggagcaggacagcctgacagcgcggcgccgcgcggcacagggactgttcggctgtgacgcatgctctc

SEQ ID NO: 54305 - DNA, 244 bp, Mus musculus
  source 1..244: mol_type = other DNA
atgcaggcatctacatgaaaattcacaattcaatgcaatgatagatagacaggcatctggatcttaaggagacccttaaaactcaagattctttctggttccaggtattagaaaaagactttttcttcaggctttgtaagggcccacaattaaatctacatacgtatatttccattcccccaaccccccggatcggtggaggaatcgctggaattacaggcacttatcaccactcagtgggctc

SEQ ID NO: 54306 - DNA, 368 bp, Mus musculus
  source 1..368: mol_type = other DNA
aactgatgtagcaataagttaggttcgttggaacaacagtaaaaaagttagtctacctgttcttttatcagaaaacagaaaaattaactgaacaggaactgaaacgaggagagtatttagcaacaaattgttttataagtgtgtcaaatcccttaaggactgagaattcttggactatttcaacttaatttatggaacatctacagctgtgcttgacgtctacactagtctggactgtatggatcaatggcttcaagcggcccgactgtgacgtccttcagctttcaaaatgggaaagcgaaggttctcccgacccgccgcccgtctgggcgggtagtctgtccggttggctggccagcaggccgctg

SEQ ID NO: 54307 - DNA, 373 bp, Mus musculus
  source 1..373: mol_type = other DNA
tcatttttgaaaaagcatgcctttttaaaaatgattgatttattatatatatataagtacactgtagctgtcttcagacacactctggaggagcagtcagtgctcttaaccctctaccttggccaatttacacatattttaattgaaaaatctccatgatgtttaagaagtttgcaacctaccacactcctataataatgtcatggctgaacaacttgatcttagaagttggccaaatttattttagatttgtgcaatcttgatgtcacataaagcccaccagacagaaagcttactttcatgaggtctaacaaagtcaacctttgtgatagatatatttaaagacaaaaatcacatttcttgaatttactcc

SEQ ID NO: 54308 - DNA, 277 bp, Mus musculus
  source 1..277: mol_type = other DNA
tcattgaatactacgtagggcgtcaaaagggaaatgaccacctaaggaattttcctgtgacagcagtcagccttcccggggcttggggcctgaaatagaggcttaatacatggagccattcagatattcttcctgaaacagagcgcccctctctgaacacataactgccttcaaaggcggtgcgcgccctttatgacaggtggccgcgcagtgcgcgctcccggacgtctgaggggaccgccgggagggacagcgatggtggcagccgaggcagccc

SEQ ID NO: 54309 - DNA, 411 bp, Mus musculus
  source 1..411: mol_type = other DNA
gctagcctggtttgcatagcaaggagaatgcattaatgaaattgtaccttcttgactccaggttttcaagtagcatttatatttggaaattgtttcccacccagatacttgtaaacatatttccatggtatttggtttgattatagtgctgacaaaataatacaaatgtgtctttaaatatgcagtttactatataacatgttccgactctcacttgtgaagccttctccaggggaaactttaatcctcaacgttaatgcacagggagaatatttaccaaagcaacacttgggacataattatcccaatcatttgttttttatctgaaataacatttaagtgggtaatcctgtattttatctggcaacgctaagagagaagaaaagccgcggcactcagtccgccggcgtc

SEQ ID NO: 54310 - DNA, 277 bp, Mus musculus
  source 1..277: mol_type = other DNA
tttacattagtatcactgtaacactttagaattgtcatgtcatgccttttcaaacacgtttctggtctgagaggtttctctgtatagccctggctggtagaccaggctggcctcaaactcagaactctgcctgccctgagtgctgggactgaaaaaaaaaaagtgcttttattaataaagcttaaacctttattgtgtttattctgaaaatacactcctgtcaagggatgtaccccaacagagactgcagcactacgtgttaagcatactgttcaag

SEQ ID NO: 54311 - DNA, 257 bp, Mus musculus
  source 1..257: mol_type = other DNA
aattatgccatagaaaaattttagtggtcaagcgtacttaagaaatggcatcttgccagtacattgaaatgcgggtgtggtggcacacgcctttaatcccactcggaaagaaaaaaaaagctgttgtttgtcatcttaaattcagaaagctcaataaattccttttgcatcttgtagaagagtctagaaaggccagcctgctagctgttcttcacagataagccattagcttgaagaaggaagtcctaggggttttt

SEQ ID NO: 54312 - DNA, 268 bp, Mus musculus
  source 1..268: mol_type = other DNA
cagacaaaactgacattcactacttctgtgtttatctgagacgcgtttataaaatagaactaagatgataaaaggattcaagccttaagatgaacaccatttagactagttaagactcagtgattttaatatgagaaaagtgaaacactaggtctgttacctggaataatcaatttgtcctcacagcaatcagtgatgcatctcactggcggaggccttaatgactctacaattatcataaatgcgaatttgattcccagttcgaacc

SEQ ID NO: 54313 - DNA, 399 bp, Mus musculus
  source 1..399: mol_type = other DNA
tttgatggagaacccttgtaaacaagattaggcgatttttattaaaaggcatggcatgggagtgaattccttgacatctcttccatcttgtaatgaaacagttcccatttcgttcctttgttttataattaccaacctctaaaatgtgaaaagttaatttataatggttagaaagtatgcagtctcatattattaatagaagcacaaactaaacttccatgcttttatttaccattataagctgctgtatttttaaaaaaaaataaaaataaaaattgtacgtaatcaaagaaacacattaaaaatatttttttccagtcattagattggcttagaatcaggaaaaatttctatttttataaagtaaaaaacaaagtccgggagtgtgttttctttatg

SEQ ID NO: 54314 - DNA, 222 bp, Mus musculus
  source 1..222: mol_type = other DNA
catttgtacagaggttttaaaggttctctaaaaactactagcactcactgacttgaaggtacatactcacgtcgttgccatatgactggagctgaatgagcgattctttgactcccggcagcatccatgtcgccgctagttaaagggcggaaacagagaccagtttctccgtctgcgcctgcgtgcgccctccctctgcagaggaagcggtggctccgcctt

SEQ ID NO: 54315 - DNA, 386 bp, Mus musculus
  source 1..386: mol_type = other DNA
tggctaaggattatcgttaaaactttagcatctatagcaatccaaaacaaaaacaaaaaccccttgacttgtggtttttttttttttttttttttaattctcatctcattaaaattcaccaagatatttggttaagcacccatcatgactctgcgcgcgcgtgacaggatttaataacagcatcgtttaaaaatgttttttttttcatataacttattttctattgaatactatcacctaggctagaggaacagtgttgctaggtaacaacacgcgttcgctggcgcctgcgtggcccggataaggcggagccaccgcttcctctgcagagggagggcgcacgcaggcgcagacggagaaactggtctctgtttccgccctttaac

SEQ ID NO: 54316 - DNA, 310 bp, Mus musculus
  source 1..310: mol_type = other DNA
taggatggccaccatgttctattcagaaactactgggcagctgctgcactgttgcctagcaaccctgagggacagctcagaatttctgcaaaagcttttgtggaaagatggtctgatcaagaaacaggatctgattctgtctcacagaatgttggctcttcctttatgtcactaggaggaaattaaatttgcttaaagagatttcagctcgtgttatttagctaacaagattgtgtcttacacttctcacaggaatgattagatactgcgtcacggagccattactaatggtatggtccttagcatcagg

SEQ ID NO: 54317 - DNA, 405 bp, Mus musculus
  source 1..405: mol_type = other DNA
aacataaaatattgttggaatatgacaccatatgattgattctgttaagcataggtaaccatgaggccctataaggaaaccaaatgtttccgtagctctttagtaactaatagaaaccctaattgcagttttcaaaacctgacagtgagtttttctcctaggataattaattttcactattgaaggactccacaaaagagtgaaaatttctagctagctacaggtttcctaagtagaactaaatcccagccctttgggaggggatgaaagctgcacccttccatgatccttaggatgcaattttgaaaatctatcaagtacctgacacttgggtatagctagttgggcggggtcgccttgtcgcagagcccaactgcgcctgcgcggactgcggcagaaggcggg

SEQ ID NO: 54318 - DNA, 306 bp, Mus musculus
  source 1..306: mol_type = other DNA
aaaggctttttccaagaggatgttagttcggtaaaattcttagggaaaaaaaaatctactacaaattttattagtgtataaactccagaaaacctggagttttaagttattcttgctttgaacaaggccacctggacttttataatacttggagacctccaagaaacatgtccaaagagacctgtggccaagggctgcttgtgtgttttcacaactcaagacccaagtgacttaacactgggagaaccaaggttgcaatccctgtttggctgaggcatgcttccagtctataggataccatggaag

SEQ ID NO: 54319 - DNA, 481 bp, Mus musculus
  source 1..481: mol_type = other DNA
tattatacaagaacaaaaatataagaatctaattagttatcagaatctcctaaaatcagatttcaataaaaaagcccatctattttaaactaggaatttaaaaataaggcagtcttagatgtcaaattgtacttgtagatgatcctcatatcaatgtactcataatagtgtcctattactttgagtagtatttcagcacagtctaacttagtataagataaaatttatcttccggtttaagtaaagcctcctattttcaatgagactttgtagttccctccaagaaagtgtatgaaagtgacactttctgatgaataagggatatctgagattctcctcccttcaagctcaaagtttggctagggagagctttgctgaccaatcagggctgaggggtgtggcccaccattgttctgacagatagataagcagggtgctcagagctctggggccagtccctggagagctccgctatggctcg

SEQ ID NO: 54320 - DNA, 478 bp, Mus musculus
  source 1..478: mol_type = other DNA
aaaagcgcgcccagaaatccatggagatcatttttcaaaaagatcgctttctatgtcctttttaaaaagtcctgtggaaggagctggagcgcccctgtcccgggccagataccccttccgcagcctcttttgggccagagaagaggagctcaacagcgcgaggactccctccccccagccccggtctccggcacttcccagaggggagcagcgggagagcctgcgtggccgtggtcgccaatggcctccacgtgcagtttaagaaaacctgccaaaagcagttatgcctcactttttcctgccatttttttcataataaaagagggagtgaagctcgctcgctcgctccccgcctcacaccaatctctgaggggatgccagtgaggtgtggctttttaaatatcgtgccatttgcatctgatagctccaggaagccagagcaaggtcaggagcgcgctgccccacgctccccgccgct

SEQ ID NO: 54321 - DNA, 421 bp, Mus musculus
  source 1..421: mol_type = other DNA
tggtaagtgagatatacccccaatcatatcagattgaactaatggccaatttcaagattgttcaatatcaaaagaattagatgtcaatgtccagttgatcatatatatataaatacctgtaagtatccttaagtagaggccagcctcgcctagtcagtagaatttttctcattctctttccacaaaaggtaaaaattcacacgctgaatattataatgaaatatatagaagaaaaattaagaatattataaaataggaaagaaaatatttatattttgtgatagagtatttgcctaacatgcacaaaaccctccccgcaaggatggatgttgtttcaccaatcgcattttcaggataatgtcaagatacatccctgacacggggatcaaatgacgtcgaccgccttagcgagggaggacgc

SEQ ID NO: 54322 - DNA, 537 bp, Mus musculus
  source 1..537: mol_type = other DNA
atgccggtcccgggagcagttaaatgttctcaacccttgagacatttctccagcacctgtcccagagtattataaaaacaaaacaaaaccacttttgatgtaagatatttggatgttcagagggtataatgcaagcttctgctttagaccaagttggaactctgaagtccacctcccaaacctgggagtttggctgggagaagctcctttatgtttgagacaatcttacattaatcagctcttcaaaatgcgtggattagaggcttttgttacttaggccagctcaaaatcaaacagttctaaaggaaggaacgctttctagatgatgattccatttttaaacgtacaagccattttgtgcctcaaacatgtgtactaaaagttcgctgagcgcgatgtctttacacgagggtgcagccttttaaccttttccgattggctcccgggaaccaatcggaaaagaactttttttttttttttaggctgagccgagccaatggggagcggcaagggctcggttcgcccgttctcacgccc

SEQ ID NO: 54323 - DNA, 326 bp, Mus musculus
  source 1..326: mol_type = other DNA
catgctaagatcctataccttttgataggatgctctaaaaagcagagtttgatttgtacattatttatctaatcatgacactagagaagaattgcaaattctaggccagtctgggctacatagtaagttctagccagtctgggttacatagggagacctggctttttttttatttattatttattatatgtaagtacactgtagctgtcttcagacacaccagacgggtgctcagaagatacaaaaaggtcaattgatctcccagcacttgggaggcaaaggcaggactttttctgtgagttccaggccagtttttagcaccattt

SEQ ID NO: 54324 - DNA, 415 bp, Mus musculus
  source 1..415: mol_type = other DNA
ggggatcaaatgacgtcgaccgccttagcgagggaggacgcgccaattctcctgcccaagcctcggcccaacaaaatggcgtcggcataggccttgctttgtttccgtggctcttgcagcagcagcagcagcagcagcagcagcggtagcggactctgagctggaagcccttgtcacgggccccggcgttctgctcccgggcgccttccactctaggtgccctaggcccgcgcgcggcttcgcggtaagccccagctcgggggcggcatgcggcgcgcgcgttgcctttcccgcctcccgccgctgcggagccgggagcccctgctcggctcacgcctccgtgcccgcggcgtcgaggcctgggggcggggggtgtcgcgggccaccgaacgcttgcggtcagtctttcgaatct

SEQ ID NO: 54325 - DNA, 259 bp, Mus musculus
  source 1..259: mol_type = other DNA
tgcacgcgcgtgtgtgtactactgcacatcgattccctggattattaatgctcttaaatattgagccagcctggagaacattcatcagatggcaaggagggagcctaggcgactgcaagcgcctgcatgcgtgcaccagggggcgcaaggagctcccggcgcgtgctccctttcacgtgacgtggaccatttccctagtcggcccagcttccgggccctggcatcgcccggaagtgggggcctcggaggtcgagggagg

SEQ ID NO: 54326 - DNA, 395 bp, Mus musculus
  source 1..395: mol_type = other DNA
ttattaatgctcttaaatattgagccagcctggagaacattcatcagatggcaaggagggagcctaggcgactgcaagcgcctgcatgcgtgcaccagggggcgcaaggagctcccggcgcgtgctccctttcacgtgacgtggaccatttccctagtcggcccagcttccgggccctggcatcgcccggaagtgggggcctcggaggtcgagggaggagctgccgctgcctgcgcctagacttgcgagcgcggaggctgcgtgctggtcaatcgctgccgccctgcgccctgcggagctccagagctcgaaccccagccctggaaacccaggtgagtcccagagcggcttccgaaggtcaccactttaagctgagaaaggaggctgggacctga

SEQ ID NO: 54327 - DNA, 456 bp, Mus musculus
  source 1..456: mol_type = other DNA
tgaaatgatcacttagatgctttgcagtcttgataagacactaaatctttgtctatcagttacttcatctttaataacagaacgtacttaggaattttatgagcattgttagttagcatgacacatgctatatgtattcgtcattatgaataatgtaaccacagcaattacattgtactttttattataaaaggggggaggggaaggccttactaagtaagaccttatgtagacttcctgggcacttggcgctacacaagtggcctctggccggtaggcgccaaccggctccgttctttggcgccccgcagctcgcgtcgtgcaggacgtgacaaatggaagtagcacgtctcactagtctctcagaccgggggcgggctcaggggcgggctcaggggcggggcgggcgcccgaaggtcctccggaggcccggcattctgcacgcttcaaaagcgc

SEQ ID NO: 54328 - DNA, 351 bp, Mus musculus
  source 1..351: mol_type = other DNA
tatcaagggggtcatctttagagaagtatcaactggttgggttttgtcaacctgacacaaacccagaaataccggaagagggactcccagttgaggaatttcttccctaagaaagctggctgagcagccctgcaaacagtgtgttagtgttttatcacagcaacagaaaacaaattaagacagtctcatagggtttttttgtaatcaaattgtgtttccccaaattaggcaacatgtgcaacaccaagacatgatctggctgagcatccccaaagagaatgtctcatgtcctaagagtttagaacaaccatcacggggtttttttaagagacctaaaacagaatgtcattg

SEQ ID NO: 54329 - DNA, 483 bp, Mus musculus
  source 1..483: mol_type = other DNA
gtcatcagacttgtcatgccggaagagcgtttaaccgctcgatccctattctgaaaatatatatatatatatgggagtgggcaatttccaccctagaggctggagcccctcagaccgtgaggagcccaaccataaaagtatttttcgaccccgaaggagtcgcaacccgcaggtcgaaaacctgaaaaagatttcctaattaaatttggatgaatgtgatattcaaatggaacgggctgtcgcgtttgccagaaccatgttcacccagcggccgagtggaggaagggcctctgagggaattccaggaaactgcatggcgcagagtcgctgagcatcgctagggcggggccccgggtagccaagtccacacaggtgggggctggcggctgggaagcagccccggccggggagctgcgtgctaggaccgccttccatcccccacaggggtggagccagaccgaggtggaaaccgcctgcagctct

SEQ ID NO: 54330 - DNA, 188 bp, Mus musculus
  source 1..188: mol_type = other DNA
gggttacttcaaggagacacagaagtttccgttgccccatccacccattggggaagcgtcaaaatcatgatggtagcactcctggaactaccatcagtgagcctataaatataagggactatccattaccttgtaataattaccaagtattagttcctgagggcctgtttcagggctataaaaccttg

SEQ ID NO: 54331 - DNA, 379 bp, Mus musculus
  source 1..379: mol_type = other DNA
aacaggactctaatttctttacagtaatctctctaagttgtcaaccatgattcaaatttattaaataaaaaattgcctggtagaaattaacgattcatgaatcataaatcgaaagctgatctcagtagtatattaaattcttggcgtgggggcaaataactgttattttaccaacaaatggtcccaaggcacaagataagtaattctggacatttggatacagcaaagtaaaataacttactttcaagatactctcatattttgcatagacaagttttaagtcaaaactgtaggaattaaacggcgctttttcttttctttttaattgttatatactaggtacaaactactcatttattagtttctacttgctttgaaa

SEQ ID NO: 54332 - DNA, 313 bp, Mus musculus
  source 1..313: mol_type = other DNA
tgcgaggtctttcagtgcccgaaattgaaataggagtgtctttcggaaagtgagaggggcggtcaaggagccacggccagtccccgccccctccctcctcctggggccgcgggcctgtgaccccactgcgtcgacagcggggggcgcgggcccccagccactcttctccgaacagctgctgctgtagaccccccacccccaacggctgttggcgtctttggagacgcgagctggccaccccgccaagggggcgtgagcaggcggccgggtgagcgcggaggggcacggaccgtgcggcaacaggccaggggct

SEQ ID NO: 54333 - DNA, 364 bp, Mus musculus
  source 1..364: mol_type = other DNA
ttcaagctgaaatcataacagatgtctgctgatgtatgcattcagcttttacacctaaagataagcataacattataaaatgtttctctatatgaagtcctattttctctcataaagatttaactataaaagttcaaagaggtaatgacttggaaattctcacccaaggacttagtttgctaggaagaggagttagaatattaaacaaactttcctgaaatgacttagggcacagtgttctttgaaagaagcaatagttttagagtcttgaatacttaacttatcctttcaacaaaattactgctaataaaataaacaccttcctccagtttatttttataaagtagaagcaggctggaacttt

SEQ ID NO: 54334 - DNA, 472 bp, Mus musculus
  source 1..472: mol_type = other DNA
ctcaattccattgaataaatactggctaaaatagcaataaatcttgaatccaagcatccaaggattccgtggaatgtaaagtcattaggctgcctaaagatggaaaatttgagaaatttctttcttgtagcccataactggccagaaagccactgttataaggacatttacaagtccttccaactagttattaataataagtttcatagtaaaattcaaagtagttttacttctggcatgtccttttcctcctaggatatgagacaatcaaaaagaaaaatgcttttcaaaattcttatagaatcacaaatttcatatatcttaagatcaagtttcacataattatattagcatatactggtaggattatcagtaagctgaacagcagacactcctcctgaggattctattgcagtagccagagataaacactcatttgtgcatattacactttaaaccagggaagccaaac

SEQ ID NO: 54335 - DNA, 440 bp, Mus musculus
  source 1..440: mol_type = other DNA
gggtgctcttaaaagcacttttcttcagtatctaaaaaataaaactttatactctgtatctcttataaactcaattccattgaataaatactggctaaaatagcaataaatcttgaatccaagcatccaaggattccgtggaatgtaaagtcattaggctgcctaaagatggaaaatttgagaaatttctttcttgtagcccataactggccagaaagccactgttataaggacatttacaagtccttccaactagttattaataataagtttcatagtaaaattcaaagtagttttacttctggcatgtccttttcctcctaggatatgagacaatcaaaaagaaaaatgcttttcaaaattcttatagaatcacaaatttcatatatcttaagatcaagtttcacataattatattagcatatactggtaggattatc

SEQ ID NO: 54336 - DNA, 326 bp, Mus musculus
  source 1..326: mol_type = other DNA
aaatacttaacttttagtgtacagttaagttaatgaatattcagtatggaaaacctttgcctctgaaaatgcagtgacattgtctgtaaaaattaaaaaaaaccctctgtatttcttagcataaatttatggaatcactgaaaagtcgtgaattttagggtattatatccttaagacccagacttgcccttgaagttcaattttatcaaaatgccaagctttaacttgttcaaaacttcaggtggtgttccagctgacgaaaacaagaagttgctgcaaaaaaatagaagcatcaacaattcgttttagcaaattcattggcagag

SEQ ID NO: 54337 - DNA, 361 bp, Mus musculus
  source 1..361: mol_type = other DNA
agatgcacatgattttactttcttcttaaagcctctgtattcagaaagtagccttatataactcattgctgcaattactttaaatggccatatgatctatgcctagcataaaactatgttgctgtcaggagctacctgagcagctcaggtgggcggaaatcaaaagtttgcctctctttcctagatctgtccacggtgaagattctaaaaaaagtttgctctctaagtaagaattaaacatgcggtcattcagaaatgtttgcaacttttcacaagggcagtggtattactcccaatttcctgaccaaatatttattatttccttctagctcggaactgtgaggtactgtgcagaaaaggc

SEQ ID NO: 54338 - DNA, 398 bp, Mus musculus
  source 1..398: mol_type = other DNA
aaattgcatctgaactatttacttttagtaaacctccgaaaatttcatggcaattacacttcctgccatgcagttatattgaattttgttttggagagtgacagaaattcaattatgcaaactgtgttcttactaatagtttttgtgattgttttaaaaaaaaaaacttaggagcaaacagggctgctcctcccagctcctccttctcattagaattgtaagagggtaggacaagctttctctgtgaattaattggtcaggaaagacactttttatattgtcaagtggcacttaagccatgaactgcttttcctgggcaatgctctttaaggaaatcacggctcctaataatgcctccttatccaatgaaaagcatttcctattgcccccggcggccc

SEQ ID NO: 54339 - DNA, 145 bp, Mus musculus
  source 1..145: mol_type = other DNA
agaggtggggtaagtaaccacgcttttcttcttcaaagttcagcagatcttgaagtacatatgtatttttcagagaaggatacaatttaataatttatagtcagcttagtctcttttcagtaaggatgccatctatgcaatcaaa

SEQ ID NO: 54340 - DNA, 365 bp, Mus musculus
  source 1..365: mol_type = other DNA
tgcagctgcaggctgcaacttgtttctgagatttttttctgaaacttagctgaaattctgacaattccatagacattgtgaagaatcagatctgtgatcaagcacacttttcacttaaacatttgtgaaaatactttatgtacagtacaaaaataatctagacatagcctttgctctcagtatgatgtagttttcagtatagcaaagtacacattaaaatgtgaatcttaaactgagagatgtattttgaagtttgcctcccaaaattcaaagccaggtcttaggtaaattttctttatatttggcttagaaaaacctactggatttagtaagaaaaacgtattagctgtttgtacagctactct

SEQ ID NO: 54341 - DNA, 340 bp, Mus musculus
  source 1..340: mol_type = other DNA
gcacacttttcacttaaacatttgtgaaaatactttatgtacagtacaaaaataatctagacatagcctttgctctcagtatgatgtagttttcagtatagcaaagtacacattaaaatgtgaatcttaaactgagagatgtattttgaagtttgcctcccaaaattcaaagccaggtcttaggtaaattttctttatatttggcttagaaaaacctactggatttagtaagaaaaacgtattagctgtttgtacagctactctcatctctttgcaaatatgcccagcactttcctttcagtctagccagagttcaaagtgaagtataatgttccactgt

SEQ ID NO: 54342 - DNA, 573 bp, Mus musculus
  source 1..573: mol_type = other DNA
aaaactttctcccataagttgcttttgtgggtattttatcacagcaataggaaagaatctaagatatccaggtactacatttgcttttcctgatataatataagaaaatagaaactgctatattctcatagtgtcttagttactgaaactttaaaagagtaaaacaaattcagttccaaagctttgcttttgttttacttcatgtttttaaatgaaagtcacaaaatcctaaaaggttgtatttgagatccttaccaatccattctgagaaactgtaatgcttttcaggcaatgcttaaagctaccctaataatatctttacaatataattttaagaacttaatgtgttactattgtttaagtatatgaagacacaattcttaacctcaaagaagaccacaaatcacacattaggtcatctcttttatgtgaccttactcctttttggtgatttcaaattgggtgaccaataaggttttttattaccattgcttaattcctaaaacagacaatatggcaaaatgtagctaatttggaaatattgacctcatatcatatgtgactcagacatat

SEQ ID NO: 54343 - DNA, 533 bp, Mus musculus
  source 1..533: mol_type = other DNA
catttgcttttcctgatataatataagaaaatagaaactgctatattctcatagtgtcttagttactgaaactttaaaagagtaaaacaaattcagttccaaagctttgcttttgttttacttcatgtttttaaatgaaagtcacaaaatcctaaaaggttgtatttgagatccttaccaatccattctgagaaactgtaatgcttttcaggcaatgcttaaagctaccctaataatatctttacaatataattttaagaacttaatgtgttactattgtttaagtatatgaagacacaattcttaacctcaaagaagaccacaaatcacacattaggtcatctcttttatgtgaccttactcctttttggtgatttcaaattgggtgaccaataaggttttttattaccattgcttaattcctaaaacagacaatatggcaaaatgtagctaatttggaaatattgacctcatatcatatgtgactcagacatatgtttatgtctttagatggaaacattagccattgagtt

SEQ ID NO: 54344 - DNA, 453 bp, Mus musculus
  source 1..453: mol_type = other DNA
cctttttggtgatttcaaattgggtgaccaataaggttttttattaccattgcttaattcctaaaacagacaatatggcaaaatgtagctaatttggaaatattgacctcatatcatatgtgactcagacatatgtttatgtctttagatggaaacattagccattgagtttaggaaactgtggtgtagttagctagatggaatcaatataaaattgatacttactgctttctgtaaaaacgcaattaggattttataaacataagaattgatttttcaatggtaaataaaattctaacagttaaactggctttttgcatacaatttaaatgtcagatactctgttcctgattgaagaagtgtacaaatcatggaaactctgaatttatcaaagccaaaatttgaatttactttgcccacaatatcctctgaggcaaaggctttcaggtaaag

SEQ ID NO: 54345 - DNA, 303 bp, Mus musculus
  source 1..303: mol_type = other DNA
tacaggttatgttcaagcctgattttacataaaactggccccatttgactggaaattcaggaaaaaggtgattataattcaaaatatctcttaagaagtagagtatttatttcagtgtcaatgtcacaggcttgtatatttaggaatgttctaggcagagatcattctctcatctaccgtatacttagagaaatgtccatttaaatatctataaaagggaccagaaggcacctagcttcttctgcaaatgactcagttaacagtctcagtgttatctcagactcaaagctgctaaatatgaag

SEQ ID NO: 54346 - DNA, 617 bp, Mus musculus
  source 1..617: mol_type = other DNA
ttgtagtttacaggagtcacaactggctaagactgattattatatctttgtctgatatctttatagtaccatgaaagctagccagtagaggtgaagtttccaggttaatagcagcttgatatttccatctgtcttacctttaagttctagagggtaaccaagaactggtctattagacaccagtgtcgaacaactatcctctagtataacaaataaaaatgccgataataattatgacttacctcttttgtagttggtaacacatgcattttatatatatatatgtatatatatatatatacatatacatacacacacacacacaccacacacacacacacacacatatatatatatatatatatatatatatatatatatatatatatatggtttccatgtgttttggaaaagatatttgatactactcatcctccttaataaggggtcatatctaaaagaaagcacattatatatgtctttctgggtttgttacttgatatttcacaattttatatttcttaatagccgagtaacagataaatatgtaaatataccacagtttcgttatctattcttcagttgatagacgaccagactattttaatctcatggct

SEQ ID NO: 54347 - DNA, 422 bp, Mus musculus
  source 1..422: mol_type = other DNA
cagtttaagagagctgactggatatccatgtaaatcttcacaatgctttgtaagccagtccgtcaatagttttcctatgagagcaaccccccgctggttacacagctggtggctgaagagaaacaggctctgggctgagaccttactctggctatcccgatcagggagaaagaaatctgggttatttcactgattcagaaaatgaggagttagggagacaaaatcttcctcatctaacattgctttaagttggaaaaataaaattataaaagaaagaaacctcaagttacagtccctggccccgcggggggccaggcccaagtttgggagaaagacacgacaggcaagcttccttcctgccttgctcttatcatgcctggggtgcaggtgaggcatgtctaccctaagccacccagcctggg

SEQ ID NO: 54348 - DNA, 478 bp, Mus musculus
  source 1..478: mol_type = other DNA
cacattataatatgcaacatgtgataagcattaagagaaataatatattttaataatggaaacttaaaatgaaatatatatcttgtaaattgataacttaaaattacagaatagaaaatttgatattctatggcaaataaatcttagtgtgtctcagtcacttaactactaatgctgttagaagtttttttcaggagaaggagaaaaataattctgttttgctttcacactcccagcaacttattaactgctaaaaacatgtagggctcatacttttctatatctgtgaatccaatgaatattaaattcttagtgtgaactcaaagctaacaggcaaataatgcaaagaaatatcttctttctgaatctaaacctatagaaagcataagtatatatatttttaattttaaatataatttattttattttttccattaataaatttacttattcacttccaggcagatgctgctcatct

SEQ ID NO: 54349 - DNA, 276 bp, Mus musculus
  source 1..276: mol_type = other DNA
ggcttttttcactggttcagattaaggtcatagtcttttacaattctctctgatgatccacaatatctatactgttaagttactaactaagtcagctgtcaagctgctaaacttttcaactgtaaatgcatctgcttgagatagaaatgagaattttgcactttaaagggtccctgcagcacccccaaggccctgaaggctacatgccattgtgctttcaccttgagtcagcagtgtcagtcctaggaagtaacaagttttgcccctcccacaact

SEQ ID NO: 54350 - DNA, 579 bp, Mus musculus
  source 1..579: mol_type = other DNA
acgtctgataagtttctttactgagggaaaccatttctcactggcgacagtgacagtaatgttaagctttaaagtctaatactgtcagactcacatctcagtaatgtaatactgcatgggagtgagaacccagtttggttgtatgtaatagatttaaattagcttaattagttattctataaaataatacaaatctggcattatgttgacttttgacaaaaatattaacagacaaaatatacttatattatgtatctatggccttagctataagacttttctccttattagcatttcaacaactcagaaagtgaactactattgtgctaggcattccttgtaattaaaaggcaattaatattgtatgagatgtatgtatgttatatgcagactctagactagactggagcaaaaacatcaaatgtttaagtatatatgtgggcactgagttaaacattaaacaatctatgtatcaaaatatcatgttacccaatattatgcacctattaaattgtgttattaagataagagtattagctggaaacaggttctagattctatatatgtgatctaatagaa

SEQ ID NO: 54351 - DNA, 357 bp, Mus musculus
  source 1..357: mol_type = other DNA
ctgtaagatctccaccaaattgggaagggatctttaccaatcctaaatcagataggggaaagaattcttaactgaggaactgaaaaaattattcagcatcctttgggattgcaagctggtacaaccactctggaaatccatagtactaccggaaaatccaggaatacctctcctggacatataaacatcagatgtgctataaagtagtagttctcaacctgtgagtaacaacccctttgggagccaaatgaccatttcacaagggttgcatatcagatatcttatatgttagatatttgcattatgatccataacagtggcagacttagagttatgaaacatcaactaaagtttact

SEQ ID NO: 54352 - DNA, 444 bp, Mus musculus
  source 1..444: mol_type = other DNA
aaataataaaatattcacttttaaagccagttttgttaaaaaaaaaaaaaagaaatatgtatggcattgtgcacataattccacaggttgaatttaagaatgaggtaaatgacaaacttctgagatttagcaattacgacaattacactaactttcagagtaatatatgtaatttctatgacactaaaattgaaatgcgcttctaaacctctggacatttctgattatagagattttatattaattttagaccatacatcagctgtgcttaagaaaaataaaatttcgaagcaacattacctctcaagtagaactctaaggttcaagattgtttaaaaaacgttcttttacactgtcagaatttttaaaaagtactttaaaagtcctatacctttgtcttcaccctttaagacttaagctctgagagaaaggctccacccgggt

SEQ ID NO: 54353 - DNA, 221 bp, Mus musculus
  source 1..221: mol_type = other DNA
ggcttcaggaataacctgaatttcccagttcgccaaaagcagtttgtccacgtacgctttgagaacctctgaccctccccacattcgaggatggcagcggaggcggaggcggcggccgcaggccccacgtgcgggcccaaagggtcaagcccctgggcgtgtccccaaaaggatactctccatgttcgacatgatctctctggacccgcacccgggtggag

SEQ ID NO: 54354 - DNA, 401 bp, Mus musculus
  source 1..401: mol_type = other DNA
aacaattgtagtctcaaggtagtggaaaaaagactttttgtcatatcatttctatccaaatttcaatgaatagttaagaactttaaaaacgttttggcagaatttcaaaacagcgttccaacagcttgttgaccttttcagaagggggaaacggcctcctccttaaagtgtaaacttcgcgcgcaatgtttatcagaatcaagggacttgatactactacaagaagttttctagaagaatattattccctgaaaacaaaacgtcttgatcatgtctggagagaggttccctcaccggaaagggtccgattgcccttacaggaagggtccagagcgtctgcccggcttagctgctggaactaggcggccgccttagtgcctctggcggccagcctggagctt

SEQ ID NO: 54355 - DNA, 230 bp, Mus musculus
  source 1..230: mol_type = other DNA
ctcagcagattggggcgccaacccattcctctgtaggagtaatcgcggccggccttggtccggactacaagctttttaaaaaaaatctgacccaccggcttcgatctgggtaggtgccgccgccggtgaagcccccatgcttgggagtcccaagctccaggctggccgccagaggcactaaggcggccgcctagttccagcagctaagccgggcagacgctctggaccct

SEQ ID NO: 54356 - DNA, 353 bp, Mus musculus
  source 1..353: mol_type = other DNA
acaccttctgagacacctcaagtttcagtaataaagataacgaatggtttggtttggttttctatgtaaatatcatctttgaattacaaatccattaaagtcactgtaggtaggcggcctgcagtggagacctgagggaggcgcgcagttccaacctcgcccttttgctaactgggaaagactggagcttctggctcaatccagtctcactttcgcttgtcgttctaacttaaaaaaaaaggtgaaaaggcaagaaaactggatttcctgcgtggactccggcaccctagaggcagtcaaagccggcagcatacgagggcttcgggcaagttcgcgggccacgccttccgaac

SEQ ID NO: 54357 - DNA, 412 bp, Mus musculus
  source 1..412: mol_type = other DNA
tagtctagcatctaattcctggcaatcatgttttactaaaaaagtacttccaaagtattttcagatgattggctaaaaaaatgttccatattttagcaaaactctgaacaaaaagaacctattctgtgctttccggtttggggaaacttgaaacttcggttaaaaaaaaatcacttacttcattattggcatcttaaaatatacaaggctttgataacgtgggcttaaagacatttaaatggattcaatataaagctagctttaggctatcttgaaccttctcccttgcccccttcccggagagggaatagtcaaaaagaattgtttcaacagatctcgcggtgctgttcgagatcctgtgttttaaaaaaacaatttagttggtggaggcggggctctggccagttatcct

SEQ ID NO: 54358 - DNA, 589 bp, Mus musculus
  source 1..589: mol_type = other DNA
cttaaataatctacatgacaatttataatgcttgtcatatagccaaatgtgttgttgacacatgccgattgtcatgaggttaaggccattctagtctccataacatattctaggtcaaccagtgctacattgtgaactatcataaaatcattagaaatgttccatttgttcatcctctggacaggacatgaccactgcacacatgaactcacagcagctgtgagtacctgtgtaagacctgtacagtgtcaagctagtcaaataactgaagatctattgacagtcagtggcttcaatccttgaaagaattaataaaatatgtttaaataaatgtttaatttagtatttcatttcataaatgtatgaattagtaaatatttttaaaggaaggttttcatatttcctatcaaaatttattcaatcagtttcttttttgatgctgatttagtttgtttaaaattactcctttttacagaagatgttgaggcacattttattgggaacttgaagaaacactttcatcgacattaggtttgcagtcctggggtaataacggaaagcagaaccaatttacgtgattaaagctgtc

SEQ ID NO: 54359 - DNA, 441 bp, Mus musculus
  source 1..441: mol_type = other DNA
aggcaggcatggtgttatgaatgccttcccttctgcctactgggagggctgcgcgcaagcagctaaactttgactgagtcttccaaagatcactttaagatttacattccaaaaccttcatacactgaatctaaattttaagaaaaagtttaagctttttaatttcttataaatgaaatataagtgagcaacatatactataacatgcattaagatcaaaatgatattttaatttgttttatttatttgttttaatttaaataagttaaaaggcgacctgaaaccgctgccactaggcagccaatggagcctaaagattgattcacttctgcttcctaatttggaaagcgagctcggtttatgcctggccaggccaagtcgcactgcgattggcctccgcgggtgccggtaacccgcgctagcggctttggttcccccgca

SEQ ID NO: 54360 - DNA, 835 bp, Mus musculus
  source 1..835: mol_type = other DNA
tttatgatagagaaaacattctattaaaaaatcctgtttattctaaaattacaagagcctctctactactactacataaaattaataaatgtttgagaaatggaaatgtgaattattctggtttgactatatattatacaaagataaaacctcacaaatatgtttaaatactatatcaaccaaatgcttaaaattatgcaaaaatgataattctccataacaataacaattatatcatttaaacacataataaaatatatccaataaaagattctgtaacatatatgatatatgaaccatgtcctctatgaagaaatctctaactaagataaataagttagtaagtaaataaacaaataaatataaatggacaaggatttattgattcctagaaattgattacaaatttatatgagttaactaaatgtgtgttattatgttaattttatgttaatacatatatgaagttcataaaatgtactgtatttcatgagaacaagaaaatattttcaaaaaaaatattgaatttgaaataaatgtagttgattatagttgttctttttaaagagaaattttatattctattttctttacatcttatctttaaataacactcacatatatggaacactcacatatatggccacatatgtccactcaaaattagtgttcattaacttgtcacaaaataattagttgtttttccaacaaggtagaatcaactaatgaataactaagtctcttacttatagtttttgaaatatgcaagcatatccatagttttaaaaataaaatttagatgtattagtatagggtggaaatatgatgtcatgac

SEQ ID NO: 54361 - DNA, 448 bp, Mus musculus
  source 1..448: mol_type = other DNA
cattattgtaactgcagatcatatattttcaggggtggcgtcttcagtactgtgcctcagattccttttaaatgtaacttgactcttaaaatccccgccctggtagtatttgttactagttactgaaatggagtgttccttgggtccaccaagctggcccttgggcagagtcaggactcctgaagctctccgcagacccgccggccaggcaggcagttcggtgcgagcatcgcgcatgctccgtggagcgcgagctgtgggctttactacagttcgcccgcctccactcggggctggggaacctccattgacgtgcgggtgacgccgcggcgccgctgccgcggggggttccaggcgccgaacaggtaacgcggcggcggccgccatattggcggcgcaggggggcggcacgggaggggggcggccccgcggatcctggcggggcggg

SEQ ID NO: 54362 - DNA, 440 bp, Mus musculus
  source 1..440: mol_type = other DNA
agagtgaactattagcaatgtgacaatctaacaaaactgtactatcaacatttgtaaactttagctctgcctaaatcatatttttctgcctttataaaattgaaattttgtgttctaataattctaaacgctttttaacagattgttagtatttagaagttactcacaggaaatacaaaatgggactttcgtatagaataagattctatctgcttggaggatacaggctgtcacttagaatagttgtactatgggattcgaatgtatactgatgggatgccctcacttgccgcatacattttaaataaatgtagacaatggtttgaaagctcccaatttagatgggcctggggaccaaagagctacatggtgttaaggcagtttaacccgctgattaggtgttaacccgttccaggttatcttcttaatgggaagaaagg

SEQ ID NO: 54363 - DNA, 650 bp, Mus musculus
  source 1..650: mol_type = other DNA
atagtttcaaaataataatttttacttatactctttttttatacctactgaacttctactaatacatactttaatttacttacttattcattgatttatttatataaaatgtggtttgatattttttacaaattagtaatatatttattttcagtatagttttataaaactattgactacactttaaactaaaataattcttttttattttttatttttattatttttgagttgatgtacaaaattttcaatttttaaataatgacaattacttatgctgtagatgataatgtcaaatagagaagctgttatgcatgggtttttattttatatacacagtaagttataattcagcactgtggttctttattttgtttgaaccaagttataaagagaaatttttctcttctgattttatttaattggagtttctcatgagcacatctagcataatgccatgtgcccagtagtatacaaaaaaatgttttttgttactgaagcaggaataaaagaccaaactttggtttattacaagtaattttcctccggacatatgtgcaggcgttatttcctttgccattgcacatattgagtactgaatcaagttctttgcatttttctgccttgcatggaagatactaggtcatgac

SEQ ID NO: 54364 - DNA, 644 bp, Mus musculus
  source 1..644: mol_type = other DNA
ttgaaagtaaaaatacatctactttcattttaaactttactttaaacataatacttgtaaatgttgatatattgactcgagagagacaagaaaatcacgtattaacaagtagtctttctatttaaagtcaacacattaatattcttattttgtgaaataaaagcttaggtttttttttgttttttataccaagaaggaccatgtgctccataatatggcctatcgccaactggtaaatatttaaacatatattcatgttctttttttctttaagtgatgaaggagcatttcgaattcagtatacagatgcgtttgaaactttaggaggttctttttattataaaactctccaagacctagattttgagttagaagaacaatctaaagactctggatcagtaacattgggactggactctgactcagaaaagtctccaagggattcagactctagaaaacacttgtttaaagctctgttgaagacttgaccaagactggaatcttctgaaacacctcaggttcagaaaagtccctggaagattctaactctcaaagactctctgactctgacaatgaaagacagaaagaagaatggcttcagcttctgtacaaagtctgatggaatctgtgtggatgatctctga

SEQ ID NO: 54365 - DNA, 614 bp, Mus musculus
  source 1..614: mol_type = other DNA
tggttttattatatatatatatgtatatatatatatgtgtgtgtgtgtgtatatatatatacatatatatatattctcttcagtatcttcatatcttcttttaaccaacaatcaaattaaaatattaaaatagaacgcttccccaacgttcctatcttactgatgccttcattcataaaacaatgtagtctttaataacagaacataagatcatatattttattttattgttgtcaaattctatcttccaaatgggatggcaaattctgtaacaaacaaattttggtaatgcatcaagtgttgccaatttaacataaggcttgcccagatttgtttttctgacaaaacaaggattgaaattaagtgaattaagtccatttagtgccttagtgaccccatttacaaataagtacactcattcttattggaaaaattccaaagggtctttggaaacattgatttttaataacattgcttatataccttttggtaatggagaaaaatttttctcaaagcaaatctcaacacttgactcaaaggattgaagtgccaggaagagtcttgggttctgggctgaggccagggactgtccggagctgatctcggatcatgat

SEQ ID NO: 54366 - DNA, 170 bp, Mus musculus
  source 1..170: mol_type = other DNA
ctctctctctctctctctgtgtgtgtgtgtgtgtgcttgtcagccagtaagtacttcttacaagctgaaccgtcttgtgtgagcaacttcctgacaggacagttctagaatgaatgtaattgaattgcctctcttatctaagaaaacaatttctaattggagtgtggatt

SEQ ID NO: 54367 - DNA, 567 bp, Mus musculus
  source 1..567: mol_type = other DNA
gatccaaataaataaaattgcttatactcaaaataggtatttatattttatagtagcataataataccataaagtactcatttaattgccatggtattataaaataaatagcttgctcttaaaatattaaataaaactgttcagaatatataaattatattgaatcagggtacaccaagtaaatgatgcttttactggatatcatatttttattcatggtaacaagaagtttcaacctggagctcttagtatcattattttattggtacctggaaatcagggatcaaaatttctctaaagtaatggctgaaacatctgtctagaaaataaatcctaaaatgttttccaagccagaaactatattcgtttttctctatgaacgtgaaaactagtcaaagacctcttactctaagcagtggtgaaaactgtattcatagaaatatattccaagtaaagactcttctttggcaatagcaaatacagttcataaccaaatcacttgtattctgagaataaatctacaatgaaaagttaattagcagtttacacaggctgtataaagatgtc

SEQ ID NO: 54368 - DNA, 513 bp, Mus musculus
  source 1..513: mol_type = other DNA
tacttaaaagtgtcatatcttcctagatatctaaaaactctctagaggtatatagttctaggtaacggagaaatgatcacaattatctagaacaaaaccatctttaaaatttatttactcaacaattatgagttacccctccttcatccctgtttaaatagtgctatagagtgatcatataataaggcttaattctcattttcacctttttactttatgcagacagaagctaaaagtgtcatattctggaatcgtcaaattatctccattataaaagtaatgaaggggtgtccgtgtctcaaatgacatctaatatctattagaggcaattgggagatcggagcttgcgcactcggactccaccggcggcgcagccttggctgcgagtccgcggggtctcctagcacgaacccagcgcgggctccacggtcggcgtggcgcgcgcgtgcgcgcgctccccctttggccccctaccctgcagcaagggtagcgtgacgtaatgcaataaagcgg

SEQ ID NO: 54369 - DNA, 453 bp, Mus musculus
  source 1..453: mol_type = other DNA
tcttactctctgaaatagtggtcctatggtccatatacatataaggaagaccctctcctcctttttaaaggagtactcatttcttgcaagggattaccttgtgggtaaatacctttatgattggatttgcaagtagttgtaaataagtgctgaacacatttaaatctcattttgtctcaaaaggccccataaaggtttacagtgcctttaacaactggaaattaagaaagcaatggaactcagttcttgtggaatgggtacctttttcctcaacggatacatctgtcagagtctttcaaaacacatactatgactattagagaaaatttcttggagtccccatggcaatctggtgaaactacctttgctaaatttacatccagtcccaggagctcaaggcagggcctctcctggcacgcaaacctgccaggtgaatccgcccctcaggggcgt

SEQ ID NO: 54370 - DNA, 421 bp, Mus musculus
  source 1..421: mol_type = other DNA
aaaaagtactttacttattgctttactattttcagacaaacatactttttaaataaggtagaatgcataagagttatattaactaaatatacccatttctatattaagtttttcttaatttggcagaaagtcagattctgaaacaaaagatttattaaccgtctactattctttaagcaaagttaatgttgcaacttacattgctaggaggctctttggaattccatgaggaatttcatttggttctttcactgagaaggcacaaatacaataattggtaacagttttcctggcctgaatgactcctttgttcaaagtgagccctttttccatatcaaacctctaggataaataaggtgtttcactgaagtctgtgaaataaatagaacttttaacattcgcaataacattttaaaaacta

SEQ ID NO: 54371 - DNA, 361 bp, Mus musculus
  source 1..361: mol_type = other DNA
aggaatcttatcatttccttaattaacatttttcttttttattatttcatttttaatttcaaagggattgcatagctctcatatgagtgaaccgaggctcagcaatgtcatctaatttttatattaatctttataatacagattaagagtaggtcccaaatcaatatccgttcttcattgttctcccaattaggctgaatatcctcagtagggctaacaggtgagtcatcttgttaccggactgactaaagatgtgcaagctctttacttttgtcacacaacataaagatgcaggagtagaggcttcactatgattctttcttgggactcggaagcttatcagaatctccaggggtactta

SEQ ID NO: 54372 - DNA, 519 bp, Mus musculus
  source 1..519: mol_type = other DNA
cctttggaatgcctgggccattcactggaatatacaagttcagagtgttaaaccctatccttataaattatatactgttttaaaccttttggtaatggtgcactttcgtgcacatgcacacgacacacacacacgcacacgcgcgcacgcgcgcgcgcgcgcgcgcacacacacacaaccctagtctgtttcagagagtggcggaagtgttgtaaaacaatccacccatctgttacgcaagaattctgttcacttgaactctctggactctttctccaggatactgggagaagccacctttccgctgagtggggaaatgtgcaagttgaattagagctaagtcactttcatgaatgaaacacacttgtgagtcgagctctctgctctgatctccaggcagtgagcaaggctgcataggcagaggctggctagggagtctccacccctagctggcggcagccattctgcgggctcgggcgctgagggggtggggcccattggctggggggcgctgcggcc

SEQ ID NO: 54373 - DNA, 535 bp, Mus musculus
  source 1..535: mol_type = other DNA
tgggagcctctcacatcccaagaggtctctggaactttctagaggtttcaattattttctacaaatgttaatactacaaaatgttatttaaaaattagtttgttcttattgtttgtatgaaaaaaacactagtgctttgctttagatttttcttttcgtcctgcatgtatgcattcatatatgtatgtatttgctttatactttgctatgacagctttaaattcagagagaacaaattgcacaatattggataatgccattattttccaataatcaaaagcaggaatgctgactttttattgtatgtggaattaacttccatgtaaagaaaagatatcaaaaaaaaatggaagagttgaactattctttttctttaagaaccagtttacatgtgatatttaaatatttggtagtcatgataatggtggtggcattcctacaatgtgataatcttatctacttaccatagcttatgtcagatactttgaagtataggtttccaactcctgaagagaaataattttacgtgcacgtg

SEQ ID NO: 54374 - DNA, 467 bp, Mus musculus
  source 1..467: mol_type = other DNA
ctgcacatctgctacatatgtgctagagcctcattgcagagtcagctgctgcatgagcctctcagaggacagttatgccacctgtctgctagcataacagagtataattaataacatttcttagagacaggaaaaattttggggccctggctacaggggtgtttggcatcttggctatagtcactcacattaacctggaaacctccagttcaagctgtcttgatttctgttcatatatacacagattttaagtttttgctgttaatactttctttacttaaataatgaataaagtaaacaactgtaatttttaatctttttacttgttataagttaacccatagtctcatcttttaaaaatatattttcgtgatatttgttatcagaagttattatgagttgaaaatatagttttcaaatattcattattttaatgcttacttagaattattcccatttttaaattg

SEQ ID NO: 54375 - DNA, 795 bp, Mus musculus
  source 1..795: mol_type = other DNA
ctcctaaaacactctgaaagtatgtcagagaggaaaatagactactttttgttattgttggtaggatcaatatgagtcctgtccatagtatttgcatagcccattgtaaatcgtataaagtaggtaatgctgttttagaacatgtttaaaaacattgttttacagcactgtccaaaattactgtaggagaaaaattcaaaattcattttaaaataataatgtttacatggttaatctaacttttcaaagatacttctaaattctgacaacttaataagtagtaattattaagtagacaattattttagtttgcagcatatttcctaataacatgtctgtgactatcacaagtggaatgcataacagtttagagttatgccttaggatatctaaaacacttgaaaattatttcaacttgtaaaaaaaagtattgaattcctggtaatataaacaacattgacatttgctactataattgaaagcaggttaggattaacatgacacttattctctattaacaaagatataaagttggaattccttttattgacatattttctttaatagtttgaaacttaggcaattctgactgactcacctattaacatctgttaaaggaagtgacatgccagaaactatgtgaatatcaaaagattctattgatattactgatggtccaaaatgttactattgtgcaataaaacaatttttaaatgctataataatgaacaaggatgctttagaaaatcttcctcatgctattatgtaaatattttaaatcagttgccatggcaa

SEQ ID NO: 54376 - DNA, 523 bp, Mus musculus
  source 1..523: mol_type = other DNA
cacaaacaatatgcctagtcctagagtactttttataaaggagaattttttaaaaattaagtgtctgaagacagtgtacttacatataataaataaataaataaataaatcttaaaaaaaaaaaattaagagcaatattacctattaatatattagctataacaactgtattggcattacatttattgcttacaagtaatgcaagccagagacctttttattaaaagttacaattttaacttctaagttaaatttttgaagtttttgattcatattgatttttataaaaatttaacagatagttattttaagcgatgttatcgcagcattatatttcctaaagttgttcatactagataatatcatcctgaggaaacataaaattaagagtcgtagttcaccttaaaaatatagaacttgcagcaaaactattatagtgagtgaagagatacactgtgactcattaggtcagtgcattctttattatgctctctgtgacatcatagaatactctttaaaggtt

SEQ ID NO: 54377 - DNA, 490 bp, Mus musculus
  source 1..490: mol_type = other DNA
aacaatatgcctagtcctagagtactttttatacaggagaattttttaaaaattaagagcaatattacctattaatatattagctataacaactgtattggcattacatttattgcttacaaataatgcaagccagagcaaggacttatttttttcttcctttttattaaaagttacatttttaacttcaaagttaaatttttgaagtttttgattcatattgatttttataaaaatttaacagatagttattttaagcgatgttatcacagcattatatttcctaaagttgttcatactagataatatcatcctgaggaaacaaaattaagggccatagtgtattcacgagattcactgtgactcagtcgtggtatatcatttacaattgtttgattttatatgaaatgtatttctttttttttaaactatgttccttttttaaattaggtatttatttcattacatttccaatgacatcatagaatac

SEQ ID NO: 54378 - DNA, 445 bp, Mus musculus
  source 1..445: mol_type = other DNA
gttaatttaaaacatgtcctgctccttttataactcattttcaagttattgtcaatgatagaggacatctctttcgatataacttagaaaagttttatagcctctattttcaaatagaatgtttatatagaggcagtcacattttcagaagagctttgcatataataactgcagcgatgcttttccttaatgagctacattcaaattttccataagaagaatctcaaaatagatcataacgaattcaccatgacaaattctcctgggacaaattggcacagttttagtgactttaaacagtttgcttttactcacatgcctgggtttaagtgacagctatgcattttggcatcaaagaaccatggttagatgtctgtcagtatccacctacactgttagcggcagctttctggcttcagctaggctggaaagcaagaaaaaactg

SEQ ID NO: 54379 - DNA, 578 bp, Mus musculus
  source 1..578: mol_type = other DNA
tctatattcaacaaaaagaaatactctagtgattttctgtgtttttactgtaataacaatctatatttttaatttggaattttgggaagaaaattacacatttttcatacattaaccactacaaagttggacatatttattcatgttaactaaattttggagttctccagatatgactaagtactaaaacagatgaaaaaatacaatgtatatgtgttcatatatttctatgttggtcaatattaaatagatacttcaatcactttcagtttcacttttaaggatatgatgatagattttctagatccattaaatacttgaattgtataagttcatatagatatgattcatgttaccatggtgaaaacatatgttatcatatttgttttatactctgaatgttttattataaggaattcaagtattcatttttccattcttggggaaaatgatctctaagcttaaattattaatgcacatctagaggagatttcaggttgccattttaaattgggactatacttttgttgctaggtttcacacatgtagtatcattgtgatgcatacaatggaatttt

SEQ ID NO: 54380 - DNA, 192 bp, Mus musculus
  source 1..192: mol_type = other DNA
cttgaattcctgatctttccatgacttttatcatgaaggggtattggaaagtactttctcagcatctaacgagatgatcctgtattgatggatttccttattttaaaccatccctgcatccctgggatgaaaccatcgatatccgtaagggaaattaattttctcaaagaaccagctcctgatttggttgat

SEQ ID NO: 54381 - DNA, 409 bp, Mus musculus
  source 1..409: mol_type = other DNA
agctcatatgaaaacaacatggtgttcagaacattctctgtatatatattatactacaaattcaatatgaaatgttttgttcagaaacaagtgttttctgagagacagaaaaacatattgtataagacaagagtctactttcaataaaataagggcattccctttgtcaagccaaacttttcttgagcacggataagaaatacttgtgcataaggacaagtttctatacagacaacatagtgctgaagtagttatttgagtaagggctgacactggaagactcattgtgtatcccaaggtagtggaagcccctgtgagtgggctgcaaccaatgaagggttgcattggacttggacttgaggcccacagcccagcagcaggtcactgtgacatcgcactctgaggccac

SEQ ID NO: 54382 - DNA, 539 bp, Mus musculus
  source 1..539: mol_type = other DNA
ggtggatcaaccactcaaactgacagcctcctagaacaggtcttcctgtttgtttttgtttttaatatttcatgcagcataaatatacttagataaaattgtcaaagaattttttgaaaattttaaatttaactgaagagaaaccagaataatctatatatacatactacatggaaaaagaaataatatacttgctgcagtcttttattaaagataatattttagagaaattgctactattagatgagaaaacattataacattttaaagaaagaatgttcacggtcttttaaacttacactgtacattcatcaatgtgaacccatggtatgtgcacttgtacacctgcagaaatacacagagaataagtggaatttttaaacgaatggtagtattattctctaatatatgctaatattattctccaatatatgtacttagtatttagttgacaaaattatgaaaggtatttttaaaaaatggagttataacacatacacaaatacattgatatacagagccagttgcctcagttgtta

SEQ ID NO: 54383 - DNA, 528 bp, Mus musculus
  source 1..528: mol_type = other DNA
ggataccacaaactgacagcctcctagaacaggtcttcctgttttttttgtttttaatatttcatgcagcataaatatacttagataaaattgtcaaagaattttttgaaaattttaaatttaactgaagagaaaccagaataatctatatatacctactacatggaaaaaaatatatacttgctgcagtcttttattaaagataatattttagagaaattgcttctattagatgagcaaaacattataacattttaaagaaagaatgttcacggtcttttaaacttacactgtacattcatgaaaaaatgttgcttagtttgtggtatgtgcacttgtacacctgcagaaatacacatggaatttttaaacaaatggtaatattattctctaatatatgctaatattattctccaatatatgtacttagtatttagttgacaaaattatgaaaggtatttttaaaaaatggagttataacacatacacaaatacattgatatacagagccagttgcctcagttgtta

SEQ ID NO: 54384 - DNA, 476 bp, Mus musculus
  source 1..476: mol_type = other DNA
ctttcttttttgtaatgtaatgctttaaatttgataatccatacctagatttataatgaacttttgaaagtccttatctcctaacatccttagttcatctcaggatgttaataaaggttatatactgtgactttgtaaatattcaacctgaatgcagttaaaaaaatgtcactgttttcttgcattttttatggctctccagtcatttaaagccttaatatcaatggagataattctaccattatggaggattatataaatggaaaccctgtgtctgttttgaaaacacccaggaccccaacgttccttttaaaaaaaagaaagaaagaaaagcagatgtgattttttttctactctgattataaccagttttgtcatattgaactaagcaccataaagtatgcttaaatataataataaataaaatctctctctctctctcccctcagagcaagcgggaagcaagccagtgcagg

SEQ ID NO: 54385 - DNA, 310 bp, Mus musculus
  source 1..310: mol_type = other DNA
atctgagatgccaagcttattggcaagcattagggttgcagctacccttagttttgctctgggatagccaacacacaggagaatgtgtgtggacagatttctgagacctctcacaacgcacttggctcaaattgcggcacccgggggaggaatgcttgccaaaggagcgtgcaggcaaaacgctttctgcctcctgaggttcttcatcctctgggagaggcggcctcctgagcggggggtacccatcagttggtgctgcgccatcccctcccagcaggcggctagggcccccctcgccattgaaaagggc

SEQ ID NO: 54386 - DNA, 652 bp, Mus musculus
  source 1..652: mol_type = other DNA
aaatttttacagttgcatggcaagtatttcccattgttatttttatttcaaatatttacttatatttatgtgcaaaaatattagaaatacaaaagataaaattaaatgaaatattatatataaatttaaatgatagcaattttttgaatttaataaaattctattttaacctaattattttcatgattattatctaacataaatatttcaaattcatttaattagtcaatagctgtacctaaaaattcagaaaatgaggagacattaatagacaatttttatatctaaaactttaaattattgcattttactctattaattcaatattgtgtacacaaaacacacaaaatcatcattccacttttatgctttgagtgggtcaaaaaatatatgaaggaatccaaacatcttataaaactctagagattgcattattcacttcacaattaaaccaattctgtggtcctttttttataggactgtattacacttgagagtaataagtttaatattttcaactctttccaagttaggttttaaatctgatccctacttttaaaatattttaaagagtggacaaatatttcagtgagactatcatttgccatgaaatatgaggacctgagattgaatttccatttcactggccagt

SEQ ID NO: 54387 - DNA, 24 bp, Mus musculus
  source 1..24: mol_type = other DNA
ttctgttcctcagggcataaagtg

SEQ ID NO: 54388 - DNA, 422 bp, Mus musculus
  source 1..422: mol_type = other DNA
atagttacaatttcaaattagaacgaaattggtggcagatgacatcttaaacacttaccatttaaacctttgtttgatctaaaatgttggtacaagctttaaaatttagcagtaagattagagtatataatattctacctttaaaacagatttttaaaaatggtgtaactcaatcaggcttgccaaacaacagacagcacttattaaatccactatgtagaatgaaatcacatgctcatggaatatttagagaaaatcttgtttgctcacagaattcaatgacgtcatttaaagcattttcacttttattattactattaacagtaggacctcttgtctattttccctttgaattaaaaaacaggtaagtttgccttggcaacccaggtgcatatgggccatggctgcccatcctaacccag

SEQ ID NO: 54389 - DNA, 609 bp, Mus musculus
  source 1..609: mol_type = other DNA
atgaggtgagaattctatgttcacaattgtgtcagaattcttgtatctataatggcttctctaatatataattctaaagtagtttctttactctctttgcacttaatataacaaaaaccaacttaagatacaatggatttattttgatttatactttgtaagaacagttcatatggagaaagggaaaaacaatttcccatcttgatttctctcttaactctagcccataggatactattgctgacatacaatgtaggccatttttacacaaattatggttactattactattattatttgctgattttaccacttagaatttctacataactaaactaatagtaattaaattgatataattttcggtagactcatattatgaattattctaaaatgcttttaaggcaatacatttgcctattaatatatggataaaatacttaaaatttggttgcttttgagtctcaaactatatcagtctcatatttcagtacttataatttttactatcctcattctgacactggaaaaaaaatggtcatcttttttagcttttgcataagtatttccctcacaattcagttgtcatagaaaccttcatgtagattc

SEQ ID NO: 54390 - DNA, 418 bp, Mus musculus
  source 1..418: mol_type = other DNA
accattggctctcctaggtctttgggtggcccatggaccacattttgagcaaatgtctgttacaagcaaaaggctgcctgcccctttttgtgtaaattgaggctgctttttaaacaagaaagttttatttttcaacatgaaaaacagaacaacagtcatgtattcggacaatttgttttggtgcaccaaaaacagacaatagacagaatataactcggtgtctcaaagctaagctgcacagtggctgttgcggtgagctgctcatctccgccgcctccccctccgctgatcccctggcgggaccgctaagctgcagagagcgcagcccgcgccccagctgtagtgcctggcggccccagccccgcccacgcgcttctgtcgcaccgccccctgcgctgttgtcagagcgcgggacaca

SEQ ID NO: 54391 - DNA, 320 bp, Mus musculus
  source 1..320: mol_type = other DNA
acatcagttgtctagagatttatcttttaaacaaagtttcaacacataaaatcttatgtactaaactagcttgggaaatcgaagataggattcagtccaatagtaaattctaaattgattgtatttttttgggccacaaggcaattgtggcaagaggcacctaggcaattaatcagaactccctatggtggttttcttatacttcctgagggccttctgcactagaagcggctttcggagcccgcccgggcgaccgacagcgggcccctaaacgccgccccgagggcggaggcgaccgcggtgattgcagctgcttaggg

SEQ ID NO: 54392 - DNA, 383 bp, Mus musculus
  source 1..383: mol_type = other DNA
tcaaacatagtttatttataggaagcttagaggctaagtccttaagccaccgatcccttttgattaacggaccagcagccctgcagcagcagctgctgcttctctctctgtgtgtgtgcacgcgcgcgcgggcgcgctcgagctggggtgttcccaagatgcactggccaagagcagaaaagaaaaatcaaaccctcatctttttctgtaatctctgcagacaagagatgcaaaactgagcttctgcaggggctctgcagttcagggtactctactcagttgggccagtgtcctcgcgccttggtcccgccccaagaccggagccgctgggctgcgcgctgattggctagtgcctggcgtagccgggctcggcagctcgggct

SEQ ID NO: 54393 - DNA, 428 bp, Mus musculus
  source 1..428: mol_type = other DNA
ataattctgcagtgctttgttatggtatcccaaacactaactgtaatcaccaatcaagattaggattagtaggtaacatactgatataagtgatatattaactccaggactggataatatcatttaagcatatatgctaaagtgacaaaagcagaaaaagctgacaattgctcttcattttatcctggtttcaattataattagtcaaatatactttggaatagggagaattcatggaaagtacctgatacttaatattcctacaataaatacttgtttaattacatggaaatcaaattgtatttttaagttcatagtgaaaaatcattatggaattctgtgcacagaagttatatacatatatgggtatatctatgtaacaaatcgtagcacgggagccccctgggctccctccggctctggtatga

SEQ ID NO: 54394 - DNA, 535 bp, Mus musculus
  source 1..535: mol_type = other DNA
tactaaatttattgaagtccgatatcatttcaagttaagaatgttaatatgaagcctctaaatattcagtattattctctttattctctttaaaatattagatagagttacttgggatctcaatgaagctcaaggaggtacatctggcagatatctagtatctactagtttgaagccattttggtctgcatagcaggccatccagggctacatatgagttttaacactgtctatgttgagcaattgacaaagttataatgtataagatgatataacatcctattttaaatgttaagataataactgggagatgcttttaagttttatcctatggtgaacaaaaggtaaaatgtactttttctggccttttatggtttcaaagacagaataatttccctgtttgtgacagtgaaatactggaataatttaggatatatatatattttttatatcctatataaaaatatatatatatatatatttaagttaaatagccagtccttgagcagctaataggctgcatgtgctgaacagg

SEQ ID NO: 54395 - DNA, 335 bp, Mus musculus
  source 1..335: mol_type = other DNA
ggaatgaaataactcattttccaaatgttattatttttcgagcaaactttcaagtagaaaaaaaatggggaatctccttatctttcatgaatacataacctggctgtaaagtctgtattgaatacgaggtagatattgccttccattaattcatttgtatttatgtacattttacatacttattgtgaatctgattagaagaagaaaatatccttatgctgttctcatgagaagtaaagatcgtattcaagtggagggcaattgggaggctggaccttccaacattgcgggcgcaagtattattaacatttagttgagttttcggcagtttccgt

SEQ ID NO: 54396 - DNA, 377 bp, Mus musculus
  source 1..377: mol_type = other DNA
gggtaaatataaacatttttgtgtgtatcgaaggacaatgagcacatgctttcaaaagacagttcttaagcaggatccagtgagactgatttaactagtttgagtgtgaatgcatgaaattaatctataccctttccctattttactttaaaaacaaagagtcaatctgaatgatatatgtgttaatatttctattctttttaaaagtttttacaagttattttttttaattagatattttcttcatttacatttcaaaagaagtactttactattggacaacttttgaaaaggcaagtgaaattcctccagtgccttaaggctttgggccctctgctcaaatagccctgcgctcagtgcggccccttgtgcagctt

SEQ ID NO: 54397 - DNA, 296 bp, Mus musculus
  source 1..296: mol_type = other DNA
ccctggagcagagccctgaaaactactccagtttactgtctagattggtgtgatatctggctttggataattctattatctaaggtattctatcagtcacatagtgattttaaatggaatttcctttctttaccagaattacatcttgagacaaatctaggacctcatacatgctatctatgtaagccttctacaaatgaaccacatatccaacgaccttctgcaagaatggcttcttactgcagcccttatgacgtcgtctcgggcctggccccgccccgcggcacgccgctcac

SEQ ID NO: 54398 - DNA, 485 bp, Mus musculus
  source 1..485: mol_type = other DNA
aacatttcacagaaaccactgatttttttaaaagcataattaaacctatctatttcagactaccctgcaatatactctgtagtttaggctaatctggaacctagacttttcaagagatgttaacgggtagttgacactatgtaaacatactgttattacataaatatcaccttgccatggatagattatttagatttatttaaagaacctttcagaaaagcctccctaggcatgctttccttccattcatagtatgggaaattaatcttagttcccatggcatgcaaaaagccccaggtacatatacacaagaatgtttggggtttttttgtaaacataaccttatcagaaagttataaccaatgaaaatatgatcatgatatattatataaaaacattctaaaagatctaaaacaaaatttccaagtgtgtctgaccctgtatcatacacgtgacaaagcagtgttcctcagaagtcctctctg

SEQ ID NO: 54399 - DNA, 442 bp, Mus musculus
  source 1..442: mol_type = other DNA
attttatcagaaattagatattaagtccttataattattctgtaatttacacatatatgctacttttgaaagctccacctttttaaagagaataaagcagatgtttcttattcgctgaactacagtctagatagacagtgctgctatgaactcaatttcctggagtaccaggtacacagcctgactatggccagcttaccttgtttcacaataaattaatttaaaaaataattaaaaatttaaaaaaatagaaacttccttaaaacacctaattatgtttctcagtgtaattatatatttcatgaaactcttaaattaacttcttatcaaggagagcagtgctttatggaatcccattgttaagattatcagagagactatttaaaaccctcagcagggaaaacccctgtggttgtcagaggcagggcttgtctacctaagc

SEQ ID NO: 54400 - DNA, 422 bp, Mus musculus
  source 1..422: mol_type = other DNA
aaaactactccagtttactgtctagattggtgtgatatctggctttggataattctattatctaaggtattctatcagtcacatagtgattttaaatggaatttcctttctttaccagaattacatcttgagacaaatctaggacctcatacatgctatctatgtaagccttctacaaatgaaccacatatccaacgaccttctgcaagaatggcttcttactgcagcccttatgacgtcgtctcgggcctggccccgccccgcggcacgccgctcacctgttgcccctcccccggggccgagccgcctggcgggaacgaccgcggtgaggcgcgcggccgggctccgcggcggcgcttcggggccaggtgcttccggctcccaccggacggaggcgggctgggccgtggtctcgctcggcc

SEQ ID NO: 54401 - DNA, 551 bp, Mus musculus
  source 1..551: mol_type = other DNA
caaagcaacttttgtagaaaggggtttgtttggcttacatacgctcactgttcatcattgaaggcctgtagtaccagcctaggggtggcactacccccaatgagctgggatctggatctcaatctctagtttgtgtcaagttgacataaaactagccaccttgaatctcacacagactgtggcatacaaaacctaatacacagactctgaagccagactgcctaggtttgaatttcggccttaagtaagaatgacagtactctctttgttatgttgcactaaggattgaatgaattaacataaataaactacttaaataagcccagtacattctatatgtactttttgtttctctgtatagccctggctgtcctggactcactttgtagaccaggctggcctcgaactcagaaatccgcctgcctgtgctgggattaaaggcgtgcgccctgtacttttaaaaagaaataaactctataatgaaaaaaagttcatttagtaattatctataatcactggttgctaagaactagcaagtggttaccatagac

SEQ ID NO: 54402 - DNA, 452 bp, Mus musculus
  source 1..452: mol_type = other DNA
gcattgactgctctggctcacataatgtactcacatatataaaataaataaatctttaaaaaatatgggttagaggaatagcgttgccttattttaacttaattaataggggggagagagattggagaccgtactgtcttcactgcctccaaaagccaattggctttgtactacagaggaatattcaaacttagccagccctacttaaaattcaactagaaagttacctaccaagtactaattagcattataaagtcagagcctacaactctcagttagttgtttactaagataagaaaggacatttttctttagccctagattccaggcagaactattgagcataaataatttctttttttttaattttgttaataaaagggaggagatgtagtctcccctcccccagcctgaaacctgcttgctcagggggcgggaatcgggtcccctcc

SEQ ID NO: 54403 - DNA, 288 bp, Mus musculus
  source 1..288: mol_type = other DNA
gagaagaataaaaatttttaaaaaattgaaaatttccatttgtcaataaataaatgaaaaggaaatctctgagttcaatcccagagatttgtcctctgagctccacacacaggtgatggcacatgagctaaataaattaagtgtaattaaaaattaagaacagaaatatattctttggtttgaaagaggcttatccagatccctatttgataaggagactgggcagcacgtctgcgggaggaggagccccgcagcactgggaggagcctgagcaggcgggctggagcg

SEQ ID NO: 54404 - DNA, 487 bp, Mus musculus
  source 1..487: mol_type = other DNA
tttgaggacagcggggctatacagagaaaccctgctcgaaaaactaaaaaaatgttttttttttcataaagttcataataatattatgctctcaagtcgctgagaggcattaaattgatcctccttttaaaggcaaaggtcacactgtgttgctgggacaacaggctagatattagattaggggctaaagttagaccctggcctaagttcattaacctctcacccagtttagttttagtgagtttaagttacttgtaggggaaaatccacctttattgtcaaacttgagtttcacatttttttctgcagatacaaagccccgacatctgactggcaggggcgcgccgcaggcctacgtgggcggagccagcctctgcgtcgtcatagagccgcgtcactccgctcgccgcgcgcgccacctcccgctctagagcggcattcgagccaaactcctctgccgccgcgggctcctccgaggcgcatgcgc

SEQ ID NO: 54405 - DNA, 429 bp, Mus musculus
  source 1..429: mol_type = other DNA
tcactttaaaggtaactgtgcctagatagttaaactagacgtccttgaagatcatggtctcagatactttagttctcaaaccttttcagaagtttgtgatccaccgagatcaattttacatttgtgtctccctttaaaagtatatatagaatgggcagttttttttttttttaatgtaatggatatctgatatccaaccgtaattcactggagatttgtttctaatattatctctgatgttgactgaaaggaaagaaaatatcctctggcttttgttaaatttattgattgattgattgattaaataaggtgtacaccaccgtaccctgttactttttctttttatgttaaattgaaatttgttgaggtcaaatgtttccattggaattcattactagatcattacatttatctctgggaagattaaaa

SEQ ID NO: 54406 - DNA, 284 bp, Mus musculus
  source 1..284: mol_type = other DNA
ataaacactggtttttgtaatagatcgtgccctatgaactgagctctttttttttttttttttgagaagacaaagtcttctttggtcaatcctgagaactttattcagaaggacttttagaaagtagtccagggtggccttgaattactatgtagcccaggctggtccaggattcacatcctgctccagtcatcagaatactggaattcgaggcttggcaccatgaaactcgaggcacacagtgccttttacgtgtagtgagagtcgttgaatctcgatctctc

SEQ ID NO: 54407 - DNA, 351 bp, Mus musculus
  source 1..351: mol_type = other DNA
gaatcctttttggtataaacacgctgttttccaaaagactgcgcctcagtcagtggcttagtggaaagggcttccctccgtcccaccactctgtccttagggaaaaggcagagtgaagcactcccttgttttcacagtgatttgctactccagcttcccgtgcagcaggtgtgtcttccatcaggctttgtttaaaaaaaaaaaaaaaaaaaaatgagctcgggaaataattttatttgctgaacctcctgcctgtccttgccagcctgggaactagctgggccgccccctccagattcctggggggagggtagcagcccctgcctcctggcctggctcagctctgcctgt

SEQ ID NO: 54408 - DNA, 280 bp, Mus musculus
  source 1..280: mol_type = other DNA
ttgccaaggtctggagctctagggcttcaagctttagatgacggtgagggttttctgacagcctttacctctgggagccaggaactagcttcatttttacttgttgagtctcacacactgaaggtctaggagggagtgagcagactgcgctgtgcccaaccaagactgtaccttgggtaccaatgacaattgtttttcagctcccggcacagaaattgaatcctggacgggctactgaggggcccctgccagggccagacaggctctggtacttttataa

SEQ ID NO: 54409 - DNA, 372 bp, Mus musculus
  source 1..372: mol_type = other DNA
agacatttttgctagagcactattcatctaatatttatagcgaattgtcttttttttaaagaaaacttttgagcagttttcagtgtaatttagtgtacataaaaataggatctgagttcgaggccagcctggtctacagagtgagttccaggacagcaataaaataataaacaacctgatgtgggtgtggattcccaaatgcgtcaaaagtttcttttgaacttttaaagatctgaaatgtagcttcattgaacataaaattctagaggaaatgattgtacaagtttaaaattaagcatcgattagtgtttaagcagttgagagtttataaaaatctttttgcataacgctcgagcattctggaaccctctt

SEQ ID NO: 54410 - DNA, 405 bp, Mus musculus
  source 1..405: mol_type = other DNA
aaggtcaagggatttctgtgcctagtattaccactagttgtccaacagcttgttgggggttgttttgttacaataaaattattggaaagagttatctattttaatttattacacagctgctctgaagctatctgaaaattgcaaaaaaaaaaaaaatcctatcattagtttgacatattcctaatcacagtgatcttaaacttaggaacaagggcccttcagtggaccacgtgggatgaagcaacttcctccttccgcggtgttgctgcggggagccgattccgctcgcggggactgcggagcgcagcggctcgaggggagcgggcagagccggcggggacagcagccccgcgccgacgcggtgagctcacagggcggtccccggcgggggcggggggcggggga

SEQ ID NO: 54411 - DNA, 217 bp, Mus musculus
  source 1..217: mol_type = other DNA
ccaccatcatgtggcaaatattggcagaacacatctagtcttgtttgctaggtgacagaatcaaagaaaatattgtaccttgtttgacttggaggaaataaatgagacagaatctcctatttttgaagcacaaaattccggcatctttatctgcagaagaaaaatgctttcttagaaaatgactcagcagggaaggaagagtctctcagactcttga

SEQ ID NO: 54412 - DNA, 198 bp, Mus musculus
  source 1..198: mol_type = other DNA
aggtcaggcctacctagccaaggctatgtagcccagactatgcatgctaggatgacatgaggacattgtcacatccacctgtgagcaaatttcctataaagtatcttatcatttctctcagcaatgctgaggtctcattgctaacccctgaggataagggatgggtactccaaacctgcttggtcttagaacgttata

SEQ ID NO: 54413 - DNA, 282 bp, Mus musculus
  source 1..282: mol_type = other DNA
ccttttaaacgaatttattacttttcgaacgaccaaaattgttcaaataattaagtgaaagcatttattggcacttgcccaactcatactggcagagggggacgcagcgcaggccgcttcccggcactcggggagggggaggggggaaggcggaggcgaccccggacccgactctgctcttccctcaaacggctatagcgagacgatagacgaagcgattgatcacgtgagcatctacacgtgtgccgcacttcctcctcctttggaaatggggcgatgatg

SEQ ID NO: 54414 - DNA, 261 bp, Mus musculus
  source 1..261: mol_type = other DNA
tcaggaacacctcagcttttctctaactcgagcttcattacagctaaagaatcacattggtcttagtcatcctcttatccaactgtacgtatggctagctcaaggctagcactaaacactagctgctggctagcttcaatcccaaagcatctgtagttcgagatctacccctcattcataccttatgcaggcatcaaggttgcacatgaaacgttcatcatcgccccatttccaaaggaggaggaagtgcggcacacgtgt

SEQ ID NO: 54415 - DNA, 396 bp, Mus musculus
  source 1..396: mol_type = other DNA
agagtaatattatgtgatgttaaaaggaaattaggttccggagtcataacacatggggtatgcattctgtggtttcccgtgccactgggaaacaccatctttctcctagaattactcatgcatgcctgctgccaaatattggacccttgagcagcccatttaaaaatggactttggggagcacactcaattaccttgttctgctcctccttgaagtggaactaaaagaatgttatgctgaggtgaaggaccccctccacttgatcctagtcccgggtctgcgggcgggaggaagtggagccgatggctgcagaccctaggcggagcctcggctcaaactcgcgtctgcaacgaaggggggcgctgtgctgagctccctacagacagctctaggaag

SEQ ID NO: 54416 - DNA, 495 bp, Mus musculus
  source 1..495: mol_type = other DNA
ggtgtggtgagattgatgtaaaaatccaaacaaacagcattggatactaacctttgaagtcactagtttgtaaggtagagtctcctgtgaagaacctcaaaggctttcaattatttctgtaaaactatcaaattttcaaatctgagtatctttccaaagattaatcatcgattgcattaaaaaaacgaactggctttgtttaggaaaaaatgtatttaaaatgtcagcaattacatctgttttctttatagtagctagaaaatgtttttttttaagtgtcataaaattgtgtaaaagaaagagtctttaaaatttttacaacctggacattttcatggcgaatgaccccttactgggaaagacaaagaaagtgaaggctttgattgtatggttttcccttcctagtaaccagggaccggtaggctctcagattggagagcgcagagatgagtgacagggcggggcgctctggggcttggcgcatgacgcggagcc

SEQ ID NO: 54417 - DNA, 362 bp, Mus musculus
  source 1..362: mol_type = other DNA
cccttcctagtaaccagggaccggtaggctctcagattggagagcgcagagatgagtgacagggcggggcgctctggggcttggcgcatgacgcggagcccccacgtgacccggagctgcagagcgacgcagccttgggtgcagtcgccaccaactccccgctgccctgcgcgcggcgggctggcatccggcccggggcgagcagagcaggtaagggcccccgggcggctgcgccgcggcccctgttagccgccgcctctcgatccctcagcgcaatggagatggattggggagggggcgtccgcacatgtccgcgggcttcctgctcctttcagaggagggacgcgcgccaccgtggcatt

SEQ ID NO: 54418 - DNA, 561 bp, Mus musculus
  source 1..561: mol_type = other DNA
taggagcgaggcacattcctcaccgctttattagactggaatctaacccagagagttaagattctgggtcttaactacatcttttactttaattaaataagttaggattaattgtgttgcttttattttaccaaatttgcaagttaaaccaaaagtagaaaaaaaaatttgcagtttgaataaaatggttcaaatcagacaactggtcatccttttttagagtgttcattcataaaacatgcaaaaactccaactttctattttcaaacaagttagtgcgttatgatagcaattatttgtctgttactaaggtccattcctttgccacttaaatttttctccacacaaatgaaaaacataattttatattctcaatgtaaaagcaaggctgattttttttttccatgcaggctcttcccagttgaaagggggtatctctgttgttaaccatagaaaattccaaccacaaaagaagctccttgcggtttgggaggctgcctcctgctgcaggtggcaatctcactggtgacgtgcccctcacgtgagccgaagcctacgtgt

SEQ ID NO: 54419 - DNA, 555 bp, Mus musculus
  source 1..555: mol_type = other DNA
aggctgcctcctggaactcaagttaaatccctttgaatgaaatgcaggcaaatctgtgccattattaatttgtaaagtctaacatctaagttgatgactgcataaaaaggaataaatggctctctcatttaaaatgatcaaaagttgaactcactacagatgtgtttcatcactcatattgaaagtattttcaaaactgtaagatgttattttaaagctgctatttagaagaaaatattttcaacgctggacaaattaactttgccaaatcgatgaggtcttgctagtaactgaaaaattttatttccttaagcatacattttaaaaggttgggatttgtttatatatccaagtggaaatagctttatttagacttatgattacaaaataatagtctatcaagcataattagattaaaagtgttaatacaaatttctctcctattctgctacagaggtcaaactcaaacgttatagagaaaccgtaacttctggtttctggtattgttatacagaaaaagactaacagggccccaagtattgggggagttagtcg

SEQ ID NO: 54420 - DNA, 546 bp, Mus musculus
  source 1..546: mol_type = other DNA
caaatttgtcatggtgacagtaaagtaagcaacagcatggtaatgttgaataaatgtatttctctaacaagaaaagagaagatcacctattaattccacttaaaagctatcccagaagaagaaatataggatattatttatccaaaataaatatggtatggccaatgcctcttcatggatcaattcatagatcatatgaaaatgtacttatattatcaagaaaaatacatttttagatagtcaaatacttagcacactttgaaatctgtttccatgtggccaagagtattcattgtctatgtgataaaaattaagcaaaattaatgtgagagaaatctttattttaaacaaaatgtttctgttcatttttcctgtaaaaaataaaggtgtagtcacagtttttaaaacaaagagtcccttatcttatatgtacaggagcaagttctaaaagctgctgcgctacttagggcctcagaggtcacaaagtcccttactggtgatgcgggtcccacgtgaccaagagagctgacgtgggcaaggtacagc

SEQ ID NO: 54421 - DNA, 138 bp, Mus musculus
  source 1..138: mol_type = other DNA
gtggtggcttcactgtaatactatttcatttgcagatgttttttttttttaaatcacacacacccagaagactcctgtgaggaaatgaaatagatagactctcctcccaggaggggggcgggtcctcttctgccgcac

SEQ ID NO: 54422 - DNA, 555 bp, Mus musculus
  source 1..555: mol_type = other DNA
tctttcaaatttaatttaggtataataataaccattatttgaagtccaaaacaaattttgtgttattttttttaaaaattatgtttaattacttggtctatatttaaaacaatttctttagaaaataactataattgcatttacttttaaataatgtgttttggcataggcaatcattttgcaaaatctttaaaatttaatgcttgagatcaataaactgaaatattgggcttatttccattaactacacaattatatgaaaatttcaaaacaaaaaatagttttgcaatagctggttttaagtgtgtattttttattataacaaaaataacagtatttaagcatacatctacgtgacaatttgtatgttttaaaggcagggaaatgaaaatagttccgttcttccactgtgcaccagatttacggtaattccatttagactgaaggaccagatcctgcttatttcaaaagaggggaaaatgtctttttccggagggaggtccgtactgcagaggggaagggggaggcatcctgcgggtgcatggctctcctatt

SEQ ID NO: 54423 - DNA, 476 bp, Mus musculus
  source 1..476: mol_type = other DNA
tttgtagaagtcaagtaaattctacatcttattgacaattcaaaagagaaataggatcatttttgagccatttttttaggagcatctaccaatgcttcaaagacatggcttagatatcgtaactttcaaagcttagcctttaaactaacatttaagtctcatatcagtaggatgatatgcttaggtataaggctattttgctattatatcatcatcatcatcaccatcaccatcaccatcaccatcaccatcaccatcatcatcatcatcatcatcatcattactattgagacaagattttattttgtcacccaggctggccccactacgtacgtgttcgtacgtacgtaggtttcaacctagcagccaaggggctcttgagccaaatctctatatctgtgtctgaattttgatgagcctgcaatgatcacgtgggcctgcaatgatcacgtgatcacgtggacacgtgacgctgg

SEQ ID NO: 54424 - DNA, 534 bp, Mus musculus
  source 1..534: mol_type = other DNA
caatattctacaatgtcagagcattttttctttctttttggacatatgaaataaaatagatagtagcagtgttctaggataaaaattggatattatataattaggggttgttatccttattgatagcaatattttaacgtgaatattcactccttgaaatatcaacataaatattgtaatttgaaatgtaataaagaaaatatctaaaaacgtaaaaaatattataatgctttctctgtacagagatcaaaacacgtatttttatttgttttaaataagaagaggtcatccaaattttgtgatctttgcaagctttttgacaagatagtgtgctaaggtggaatcctgtttttccaattagtgatccacaagtgaaacacttgtaattctgatggttatctgaacttgacacctggtataatctgtggctaggtggaggttaagcctcactcacagtttatttaagtttgagtgataactgttttctttttttttttaatctaagacacagctgacccctgctttaaattagag

SEQ ID NO: 54425 - DNA, 242 bp, Mus musculus
  source 1..242: mol_type = other DNA
taggtcaacaggacatagaactcagaagtttatggttatgaagacacatgtgagatatacattttaaaatattttaatgcttttttattaattgcatgtcattcttacttaatggaaacggactcactctgtcaaacaattgatgctaactaaggagttagaaggctagagccctctcagtggacgctcccttcatggagggtaccacccttagtgggttaatggcttggtgcccacgtggg

SEQ ID NO: 54426 - DNA, 509 bp, Mus musculus
  source 1..509: mol_type = other DNA
caatattctacaatgtcagagcattttttctttctttttggacatatgaaataaaatagatagtagcagtgttctaggataaaaattggatattatataattaggggttgttatccttattgatagcaatattttaacgtgaatattcactccttgaaatatcaacataaatattgtaatttgaaatgtaataaagaaaatatctaaaaacgtaaaaaatattataatgctttctctgtacagagatcaaaacacgtatttttatttgttttaaataagaagaggtcatccaaattttgtgatctttgcaagctttttgacaagatagtgtgctaaggtggaatcctgtttttccaattagtgatccacaagtgaaacacttgtaattctgatggttatctgaacttgacacctggtataatctgtggctaggtggaggttaagcctcactcacagtttatttaagttattttttatctaagacaacagctgactgctttaaattagag

SEQ ID NO: 54427 - DNA, 360 bp, Mus musculus
  source 1..360: mol_type = other DNA
agatggaaagtatacaagctgtcctttggattgaacagtttctctggagtggggagcccttctggctcagagaagctgacttactgccctggggggatgggattgctccaaggaccatcaaccctcccacccccacctcttagaattaggggtcacctcaatacaaatggttgtcattactgttttgtaaacaggacctttctggcaaagccccggtgtctcacagtgaagaaacttgactatatatgaaatgaactgcaatccagatggaaggctgatcctgaggcatagtggctgtgaatcccaggcaggggatctctgagttcatctggaacaaaacaagacccagatccaaaggaa

SEQ ID NO: 54428 - DNA, 329 bp, Mus musculus
  source 1..329: mol_type = other DNA
acgtacccagtgataattattataattagcaacatttcaacactgtcaagtggttgtccccttctcctcagagaaggggaagccccccacatgaagactaagtgtgcacatttgctacaaatttgaaataagatgaaagttatattttagggctttgtcagctaaatccgacaataagttatggactggcttggtaaatctatagccagataatggctatatctcacttatatgagtttatttttccattaattggtaagtaatcctaaccttaggtggttaggcacagctgactaagccaatcagaattaccagcggctgctttaaat

SEQ ID NO: 54429 - DNA, 289 bp, Mus musculus
  source 1..289: mol_type = other DNA
ttataactttcttaatattttatggttaacattaatggaaaatagagagaaaaaactttctttctttctttctttttttcttgaaagaaccttttgaacaatataaagttcaacaagaatgtcttctttttctttcttaaatagcaagatttaatcttgatttcagatgaaaccaagacctagagattaattctaatctcaaagaagccaagatctagagattaattctaatctcaatgaaggctttacaaaggaaattttagcctcttaaccctggtgggcctctacc

SEQ ID NO: 54430 - DNA, 280 bp, Mus musculus
  source 1..280: mol_type = other DNA
cctagattagaactccttcatgttatctaaaactatttcaaaacaatctggcagcagagcagttttccataggttctgccgctgcagcaagaattttatgcaaacaagccagaatttgttggaataaatgagaatttttatttgtaatttctacctaaccagctcacttcagtgggcggtggggcggccgctttttcttctgacgccacagcgtgaaaaccgcatgcatttcggtaatcgcctgcttctccgtaatgacgtagccgcgcctagtgcgtcc

SEQ ID NO: 54431 - DNA, 312 bp, Mus musculus
  source 1..312: mol_type = other DNA
ttgggtatcctggaactcactatgatgaccaggctagactaactctcagagagaagccagactgtctctgtgtcctaactgcaagaagtcatgggatcccatcttgggatgcctaccttggcagtgacaagttatttgtaaatggcactggaatccagattccccagctagaatatttggtaatgatttgttaaagactatataaaaaatttcttataatcaaacagtctaaataagggttcgccatccaatcagaggcccgtgactcataggtatgatgtcacagccatctgtccagtcacagagtgtgca

SEQ ID NO: 54432 - DNA, 310 bp, Mus musculus
  source 1..310: mol_type = other DNA
ggatcccttttgaaaagtggacagtggtgggggttgtaatgaaagcccaggaacctactggctggctggctgttgctaggtcaccagcccccctccccttccattggcgacagaaagggggggggaggttgcaaatctaggggccactgttgtggcgccaaacaggggtctgcagacgcctaaccggtgcaacccacccctccaagaggagtggggctgtctggccccgcccactccgagtcggaactacagtgggtccgggagggggcgtagagccccgtgcgcagtatccctccgcccccttccgagg

SEQ ID NO: 54433 - DNA, 436 bp, Mus musculus
  source 1..436: mol_type = other DNA
taccaagcaatctaataagaatcattaatctcatactactacaaactattggtgtaatatatattacatatgtgtactacatatatattactacacaccattggtgtactattgacaagacttaataaaggactgttttgtagttaactgattttcaatgttcattgggcatttactactggacagtgaatatagtttcaaacagtactcaaaaataacttatcctatagtaatgtctgtagtgaaaataatctaagtaaaattccacatacacagtactaaatatattcctagataatatagacactgtgattcatgtaatttatgtcaaatagcccaaaaagttgtttgtgagctttgcagaacaggccaggacatgcccgggcaggcccgtcgtcacgtgtcctgactggcctaggttgatgtttaaataaac

SEQ ID NO: 54434 - DNA, 482 bp, Mus musculus
  source 1..482: mol_type = other DNA
accagtaactcgcagtgcttggtactgggatttttatttaataagtctcttctgagagcagcagcctggtgtcttcaaattatattttaaaattcgcttgcatgctagttcatatgtgactagatgagtttttagtccaaataagtcaaaggaagtaaagtgactttgcagcgatgtaagctgcaatggttgctcccatttcttttcctctaggaactccatgaagcattgagagaaatcaagagtcctctctgcagactgttgctaggcctccctttctactggcgtcagaagctacggggctgggggccagcaaagcccagcttcaagtacaggagcactgacaggggtctgcagacgcctacgggtgcaacccacctctccaagaggagtggggctgtctggccccgcccactccgagtcggaactacagtgggtccaggagggggcgtagagccccgtgcgcagtatccctccgcccc

SEQ ID NO: 54435 - DNA, 448 bp, Mus musculus
  source 1..448: mol_type = other DNA
tttattcagatttgtatacaagcctctgatttaacagggtcactaacctgtcattaaagattgacaatttggtagtcatttatgattaaaataaggaaattgtcactgaaagcctttgctggaagtggccttaagaagccatgcacagacaggccaggtcttggtgcgcttggactgtgtgtgctccagtgaacccaggagcagaggacagcaagcccactggctgcagcctggcagacaaccatcaggatgggggcagatgcagcagagtctgggcctcctctgccactaagacgctgagggcggaggaccccagcaagtggggcagcctgttccctggccagccagggaccttccgattcagccagggggcaggcatcgtgggcggtgcgcgctccagggacgcgtgcgcgagcccggcattccgcgcgagccaggggaccgcgga

SEQ ID NO: 54436 - DNA, 411 bp, Mus musculus
  source 1..411: mol_type = other DNA
aagatcttttaatatcttaaataatttagtgtgttttaagtgtcagtaattctttcaatttattaataatcattcagtaatgaatatacagaactaaccaggcaagttatatggggatttctgtcactgaaagcctttgctggaagtggccttagaactgagtcctgtgcaaagaagccatgcacagacaggccaggtcttggtgcgcttggactgtgtgtgctccagctaacccaggagcagaggacagcaagcccactggctgcagcctggcagacaaccatcaggatgggggcagatgcagcagagtctgggcctcctctgccactaagagcagcctgttgccctggccagccagggaccttccgattcagccagggggcaggcatcgtgggcggtgcgcgctccagg

SEQ ID NO: 54437 - DNA, 615 bp, Mus musculus
  source 1..615: mol_type = other DNA
atgataacatctttgtatccacagtgatagccaggaactttcagttgctaacaaaagtctttctacagttaaagactgattataaaagattgcttacaacaaattattatgctctaacaactggacttgtttcttaagattcattaaactgattttaaatacacacatttttcaaagagatcctgtttttaacgttttccaggaaaaaatttaaacaaactattgatgatcagagtaaatctattgggagaacatttttttgccagttttaaacattttgttcaaaacaaatcttctacttttcaaaatttgagccgtgaaaaaccccaaactgatttgaaactcactgtgtaatctatatgggttccaatccatggtgaatttcctactccagccaggatttcaagagtgggccactagttctggctcagacctattaacatttaaaaatggtgcagaccctccctggtaacagggaagggagatgtccaactgtggttcctcagattggtgtggcggcggggaggcgggggcggggcctcctgtcgcaccggcctcccgaacagggggagcgggacgcagggccctcacgtgacccggggctgcagagcgacg

SEQ ID NO: 54438 - DNA, 292 bp, Mus musculus
  source 1..292: mol_type = other DNA
actttatctcatttcaagaaagtctgtaaatacactagaatctagacagggcctatcactgagacatttcttcacagtgacaactttcattctaagtctcactaaaacatcaggacgatttaataaactttgctcgttccaatcataggatcagaacattttgttactttgttctaacttaaaaacaacaacaacaacaaggttcatctgctgagtctaagatcagataatttccagatctgatgttagtgggcactcggagctcccagagtctcgaggcttcagactactt

SEQ ID NO: 54439 - DNA, 450 bp, Mus musculus
  source 1..450: mol_type = other DNA
gtatgcatgttgatacacatgtgtatgcatgttgatacacatgtgcctatgtaaatcatcttccaatgctttgaggtaggggatttctgtcaaagctaaatctcaaatatactctagctagcatgattttttgagacagggtttccctttataggccaggctgtccacaaactagacagggtttctctgtgtagaccaggctggcttcgaactcagaaatctgcctgccaattattaagggtttttatttctcaacacacctgtaaaaggtggatatttaaactgtattcaggaagttcagttagctagtccctgacttctaaaattagaattacagtatctccatttgaattctgagaaaagaatccaggtctttgtcaggccatgaaatgcccagggctcggagctttggcttctgacgcaagtggcacgtgactagcccacgcaggc

SEQ ID NO: 54440 - DNA, 487 bp, Mus musculus
  source 1..487: mol_type = other DNA
ggatatttaaactgtattcaggaagttcagttagctagtccctgacttctaaaattagaattacagtatctccatttgaattctgagaaaagaatccaggtctttgtcaggccatgaaatgcccagggctcggagctttggcttctgacgcaagtggcacgtgactagcccacgcaggcggaggcacctgttcctggtggcgcagctcctggtggcgcagagcacgcgggcccgggcggcgcggagtgagggggacggcggaccggacccgcggagcccgtcgtcggggtcccgtggccgccacccgggccgtcggcagcgcaggccgaggctgcaggtggccgtcctggtgtgcgcagcggcacggccggacagggagggggcggcgggcccgggcggagaccctcggggagtaggagcatgcgccccgcgacagcttcccatagaccccggcatccctgcatcggggggacccaggggtggtcgg

SEQ ID NO: 54441 - DNA, 512 bp, Mus musculus
  source 1..512: mol_type = other DNA
tccttacaaacattctgttcttaataacaaaagtttaccaacaaacatatttcgtttgagtgaaaagcaggcttttctgtttaacaaagacactgtctgtctgaagcctttatttgcaagtgggagctgccagcagtcatcaattaaaagttcagacgtctaataatagcaacaaatcggctgttttcagagtcggtttgcaaacgatgccattttagtaagatttttaaaaaaccccaacacatcaatatgttgtaaatactgttgcagtcattagaatactttttgaaaccttaaaattgatttaatgaagttattttctcctcatctagtgtgaaatagtgaatatgaagtatctctttttaaatatcattttaaacccggatttctggtaatctgagtaaggtgaatagatactacttggtgacgagacgagttttattgtctcctattggcaaataggaaaaagacgcgatcctcacgtgaccagcagtcgacgtgtgcagaagtcc

SEQ ID NO: 54442 - DNA, 512 bp, Mus musculus
  source 1..512: mol_type = other DNA
aatgtgttaaaaagcatttattaaattgactacctgtgtcacctactatgtaggtttttgaaaaggtcaacacattggagggaaccagggcttcctcttctcttcccaaagtatggatgatacaaacgttctgcatcacctgggttacatagctctttcccttcctcagggtgagtgagatagccacagtccaatgttcgaaactggtattttgttaatcattagttttctacctatcgttcaacaattgtttgagaacatttggtattttagtagaaaaattggagaccgatcttttcccttattttaaacactttattttaaatgaaatagttttgtgctcataagaataacacatgttcagtagaataaatgaagtttttttttaaaaaagaaactattaaaaagaaaagaaaatctgaccctaccctttatgtgcaggtatttgccctttttaaaaaaacgatttgtgagcccactggtgacgttcctgtcacgtgatcaggagcaga

SEQ ID NO: 54443 - DNA, 363 bp, Mus musculus
  source 1..363: mol_type = other DNA
ttaatcctgtttttcaaataagactattttttttaatgagacaagatttttacaaacaagaggcgccattccttttcttttcaaaaattttaacacaaatataattaccttttcgtgatcccccgaagagcactactatggggctccattaagaaattttaaaaatcagacaatccgagcactcgggtgtctgaattccagttcagcctgaactacagagtgagttccaggacggactcacagagaaaccctgtctccttttccccacatactttagggaagtaactttgtcaggccatgaaatgcccagggctcggagctttggcttctgacgcaagtggcacgtgactagcccacgcaggc

SEQ ID NO: 54444 - DNA, 538 bp, Mus musculus
  source 1..538: mol_type = other DNA
tatactatatccagtctcactccagcgtgagtgagatatgcatatatatgaaaatgttgaaagttttctagacagtccaacaattcgtggtgtatataaagtgttactttctttaagattttcgaacatggcaagtgttgaagcagcgattcttcaggcgacaccacttcttggtaataataccaccattaaaaaatgtaaaggcatatactttgaatgcatttactaaaaaacaaatgaagtatgaattcacaaatgtatctaaagtaatttggctgtcacttctgactgtaaaacaacattactttcgaaaagactacagacgtattaagaataaagtttaagttgccttaaagaaaaatcccacttctaaaagaagcaaagttccgtagcttcaaaaaatatgacgctcctctttagtaacaacaacaataaaaccaatccgcacattctttttttttcttcctccagaaaagacgcggggccacatctgccccggacctcactggtgacgtagatctcatgtgaccaggagtcg

SEQ ID NO: 54445 - DNA, 467 bp, Mus musculus
  source 1..467: mol_type = other DNA
aaaatattctcaatgtgggtaaccgtttttaaaagtattatgttatggcacaatctgtgaaaatgtgaaatcgatgatagatagtagatattgtgattgacttctgagatctgcatatctaagcacaaaatgctgaaggattatagacattttgagcttctaaaaatgtgtccgcccgaaataatcttttttccaaatatgcatatctttactatatttcaaatgatgagacttgtgtttataaaaataagtaaacccaattttgacctcattacctagtttattttgtatcttccaatttggcttcaaaaattagactataaggaaaattactttcctgtaagtaatcctttctctctccctggtaatcagagaaaggaaggagaaggggccactttcgacctctgaaattagctacttctgcagtagatgacataatcctcacgtgattagaagctgacgtgagc

SEQ ID NO: 54446 - DNA, 381 bp, Mus musculus
  source 1..381: mol_type = other DNA
cctccccaaaattttgaaaacagtttttgaagctctgaaagctaatttcatgacattgaagaaaactttgatgctttgagatataatagcataatgctaattcagtaacattatcattaatttgacatactgccaattgaactaataatccaaataaaatcgagttaaaattgagaagcctaaataattcagtgttatttattgtaggtctgtcatgttttaaagaacataagatttattgctattaatattgttattttatttttattgaaatagactttttgtcacaggagaaataatataaaaatcatgcaaagataattattcatgatgacaaggaaatgttttgttcacagctgaagcaaaagctctgctttttgc

SEQ ID NO: 54447 - DNA, 486 bp, Mus musculus
  source 1..486: mol_type = other DNA
attccagaattgttttaaagcattagttgtattcagcaagtgtcctttctttttaaagaaaaaattgtaacagaagatatttttctgtgtgatagtataaatagcacttttttttcttttcattttgcagaatgaagcatattttttttttcaaaactgaaaactcaccagccttgatagtgcaagccttttaaccttagctacaagggaggctgttttttctttttagtttagtggtccttataattttgaattttctaaatcatgctgatcgtgtgtgtatgttttaaggaaataaagagaaatatgtacagtctaccccactctctatctcttgaccctccctggtaacagggaagggagatgtccaacctgtggttcctcagattggtgggcggcggggaggcgggggcggggcctcctgtcgcactggcctcccgaacagggggagcgcagggccctcacgtgacccggggctgcagagcg

SEQ ID NO: 54448 - DNA, 296 bp, Mus musculus
  source 1..296: mol_type = other DNA
ttaagtaaatcaatgattgcttaactgagattgcaaatgactgactaatatatagagaacttatacagtaagtatatgctggaaatagatggactggaacataaagtttcatcaagcaactattatgtcactgaaattataaaaaaaaatcttagaatatatttcaaggggtataggagaacactctcctattatttcagtattttgatccaccagctacaaggcgtctgtcccacctgtagcctgcagatatgagagagatgtatgtgtgtcaaagatgcaccagcccaggcggt

SEQ ID NO: 54449 - DNA, 206 bp, Mus musculus
  source 1..206: mol_type = other DNA
catttatgcagagtttctatttatgatatagtagaggggcttaaaaataaagcacaaatgttagtacttgaggctaccatgtgagtgctgggaacctcactgacaccttgaaaaagttgattttatagaaagtgctgggattacatgcattctcaccatggggaactagatgctcgcctcttctgagcccagctgtgacgcgctcc

SEQ ID NO: 54450 - DNA, 406 bp, Mus musculus
  source 1..406: mol_type = other DNA
ccaggaattccagctccggaggacccagtgcctctgacttctgaacacatgtcacatacacacatgtagatgtatgcctaattaaaaacagtaaaatttaaaaaaattaaaaatccttcagtgtacaaatacatataattagtaactaaaacctatttttttttggctgattatagtgtagtagaattttgttaagaaaaaagaagaaatagagaaaatattaaaaattgtgctgctcaagcatgagccgaacatggggcacctatctataacccccgtcactgaaagccagtatagcccatgtagtaaactctgagttcagtgagcgactttaaaagacacaaccacgtttttttttttttcggaattgtaatagtaggggagaaaatgccctttgtcttcgaaa

SEQ ID NO: 54451 - DNA, 389 bp, Mus musculus
  source 1..389: mol_type = other DNA
attaatgcagtttgcaaacataaaaaagggacctcgcctacgctcacgcgcgcgcgcgcacacacacacgcacgcctgcgcacacccatcatcgccagcgccacgagggcggctgtgcgcccacacccacactccacagccacgcgagcctgcctgcgcccgcgtgcgcgcagacaccccgtcaggtccgcgagttgcgcaacaggctcgggggcgtggccccgggtctgccctcgctcggcacttcctttcccagcggggcgggggcgggggagatcgccattggcgggagccctcactgaaggttgctagcacccgcctttactgcggctgagtgtcactgctgggctaagcccgcctccagggtgacgtgtctgcctatggtcagt

SEQ ID NO: 54452 - DNA, 342 bp, Mus musculus
  source 1..342: mol_type = other DNA
gagaggaacactatttcctgggaagagttttgactagctgcattttccttgaaaattgcctacatggtccactcacacagtctgttcatagaatcagcagctggttctatctgcattcttctaaaaccaaagcttttgaagaaattattttaaatgactttttttcttccccattgtgtttccagtgccaggaagagaaagaatgctttttttgcttacagaggaaaggaaaggttccactcagacccaggtatgacacatttaaatggacccaaggatcatttgggaggattcaagacacttcctgatttatttaaagcaaaatgaaatctttaagggggt

SEQ ID NO: 54453 - DNA, 357 bp, Mus musculus
  source 1..357: mol_type = other DNA
gtgtgtgtgtgtgtgtgcgcgcacgcgcgcgcgcgtgcgcacatgcatgagcgtgcgtaggggtggccataattggaatattgaattttaccctagtagcagttcctggaacctccagtactgctgtctgagattctctagaacagtaattgcaaggaaggaaggaacgaaggttggttggttctttggggaaatgaagctatagctagctctacctgagcctttaggccctaggcagaagaaagggccattgtcactgtgacttctggtcccctgcgcagagaagggggcactaggaggcggcgcgggccccgccccctcccctggcgggcgcgggctcgagacgctgcgcggcgg

SEQ ID NO: 54454 - DNA, 382 bp, Mus musculus
  source 1..382: mol_type = other DNA
ttacacaaaaacaaatatatatataatgtgtgtgtgtgtgtgtgtgctttgatcccagcactcagatgttcttcagcaccttcggaagatagcgaagctgttcttacaggcgtctgatcagacgggctccgaagtgagcaatgacgatgcatctcggcttctctttctctagcttcaaatgtaaaaaaatatattaatatatattaaaagagagagtttggcccaaacgtgcttaggttaatttctaagatctgagttactaaactcgggggtcttgaaaagagcccaagttgcaatacactttatggactctctcatggagaaactagaagatgctaattacattgagcactcattttgattgggcaatgtgttgttatgg

SEQ ID NO: 54455 - DNA, 227 bp, Mus musculus
  source 1..227: mol_type = other DNA
acattgtaacctctcagtatggtcttattttgatcaggtggtaactgcagtttccatcttctgtgttctaagtgaaaactagtgtctgtgcaatgttcaggaatgcatggccctgaaccactgactctcacgtctgcattacgagcggagcagagagagcatctgttcaacaactcattcagtttggaaaatttaacagaaggggaactgacccttgccaatccagt

SEQ ID NO: 54456 - DNA, 186 bp, Mus musculus
  source 1..186: mol_type = other DNA
ctgtcagtattttgatcaagttagtaactgcagtttccatcttctgtaaccaaagttctaagtgaaaactagtgtctgtagatggcaatgttcaggaatgcatggccctgaaccactgactctcacgtctgcatactcattctaaaatttaactgggtagaaggggaactgacccttgccaatcat

SEQ ID NO: 54457 - DNA, 508 bp, Mus musculus
  source 1..508: mol_type = other DNA
cgcaatagctcttgtccgggtaggattgatctctgaccgcaggctctccgatccaggtgccctgggcctgtctgagacgtcagcagtctcatcatttcttcacaggcgccattgtcgccatttcacccctccgtatttctattcccgaagagatgagagaaaggacaaacggattgtgaatcattctcattgtcttttgctacctttctggaagaaaagaagctgccaattcggaagctcaaaatattaaggtttcatcctccccgtagatgagcagaggatgctcagggtctgctgcgaagacgcctcagcctcagagctgtctgggttaggctctctgcagggtcgcccagccaggggagtcgcagccgcggtttccaaggcagctatagctgcccccgccctagcctgcagagcagcagcggcggcttttagtctctgcccaccaatcagctgttcgcaggggcggcctccctgcaaagcctgggccaggatgctaatgcctgcc

SEQ ID NO: 54458 - DNA, 272 bp, Mus musculus
  source 1..272: mol_type = other DNA
acaaccattttatgagcaaagctgctgagatactgggtagcccagcacagggcagtgttggcatccgttattagctgctttgctgcgatacaggacaggaagcctaagctcctgatgtccgtgcacgcgcacaggacacacgtgacgccgcgcccgctcccgcgccagtctgccgcagccccctctagcggcaggcattagcatcctggcccaggctttgcagggaggccgcccctgcgaacagctgattggtgggcagagactaaaagccg

SEQ ID NO: 54459 - DNA, 285 bp, Mus musculus
  source 1..285: mol_type = other DNA
agtccccagagagtgtcttctcacatggagaaaatgattttcaacttcaaaatagttggtaactggcaggtaaagaattttatctgctttagcacaaaagatgctaaactgttggagttggcccgccaaagcccggcaactctggggtgtggcgcagcacggcgtcttgggtggtcccggaaagctgccacgagattctgggggcggcgaccttcgcagaggcttctgggatcgggccccggtgtctccggctcaaggttagaaacctccacacccggcgactgt

SEQ ID NO: 54460 - DNA, 423 bp, Mus musculus
  source 1..423: mol_type = other DNA
aaaatataaaatgatcttaaaggttaaaaataaatttaaaatatttcttttgatatactgcttaattttgtgctacaaaatgtttctcctcagtagcacactagcagtaggtactgttagtatactcattctacaaaaagagaaaaccaaatgtccacgttgatagtgggtgtgtggagaattcctacacttcaaaaagtccctaggggccattgaaatggctctgagtccccagagagtgtcttctcacatggagaaaatgattttcaacttcaaaatagttggtaactggcaggtaaagaattttatctgctttagcacaaaagatgctaaactgttggagttggcccgccaaagcccggcaactctggggtgtggcgcagcacggcgtcttgggtggtcccggaaagctgccacgagatt

SEQ ID NO: 54461 - DNA, 322 bp, Mus musculus
  source 1..322: mol_type = other DNA
atattttatataaggaatagatttttcccaggcttttaaaaaagctgaatatttagttgatttaagtcaaacaagttaaaggcttcactgggcacacctactgcaggagcccccacgtgttcaagggtccctagtcctaagggctacttgagatgtgggcccttcaagcatcccagaattgggggcgtagagcaccgttcctcctccactccggcagggggcaagggcagcggctccgggtagcccaggagctggcagcggccacggggcggaccgaagccgcagcgggcagcgagcagcgagcgcagtgggcggggcggcc

SEQ ID NO: 54462 - DNA, 278 bp, Mus musculus
  source 1..278: mol_type = other DNA
attacaacgctctagaagtatttgaagaggcataaagggttgacgctgctgagtttgttggcaaagccaactcactacgttctgggaaagctttgggaaccaactcaaagctcgaaaagcttgttggcttccatctacggtgtgtgttcgtaaattttactcggagctgctaaattatgattcgcacgtggaagcgggtctccgcgcgcgcgtgcgcgcgcgcgggcgcgtagggagctcacagtgccattccgaatggaaacactcctatttctaat

SEQ ID NO: 54463 - DNA, 258 bp, Mus musculus
  source 1..258: mol_type = other DNA
ctagcggcgctcagctgtgcactctgcactgctgcggtctggatcctaattataactaattcgtctttaaaacaaaacaaaacattaagttctgctttaagcaggtgcatcaggatggactagctaccttgttgaccagaaaagctgaactttgcgttccggcagcctagtctggcaaggacactagacggcgctgcagcgacacgcttcccttctcgaggggcgggaggggagtgacgcgccagagtggtccttctc

SEQ ID NO: 54464 - DNA, 406 bp, Mus musculus
  source 1..406: mol_type = other DNA
gagaaactttctgagctcactgcgagctccaagccatgacagggagcctgtgtctctttgccctagacacctgttcacaggatccaaggaactttgtcccctttaccaggtccccagctaccaacagctgggaaggtgggacttaaggggtctgttccctaaccccgtgggtaaaaaaatcagcccaggctgggagcggcgcagagcgggaccggttttccggggctggcagctgcctagcaaaaaagtttcctgtggaacagtggccggcgggggcgggggcgcgggctgcgggctcagcccaggacccgggggcggggtgcgggcggctagaggctggccagagactccctctgccccggggccccctggctctcctccctgctgcgcggctgcccacctggcg

SEQ ID NO: 54465 - DNA, 281 bp, Mus musculus
  source 1..281: mol_type = other DNA
tcataatgatgtattaagctttaaaaccctagtgctcaatctggtgttttgttactatagagctttactgtatttgattgaaaatgtaaattacataatatagtcactaagtgtttcatatttattttagatttcaagtccttccataaactatatgtagtaacaaattgtcccttaaggtagtcaagtcacttttatcagtatcactatacctagaaagtgacagatgcagaagccaaatcttatctaaattttacccagagtacaaaccttaattttta

SEQ ID NO: 54466 - DNA, 300 bp, Mus musculus
  source 1..300: mol_type = other DNA
gctcttaattatttttactatttcttaataatgctgaattcatgaactatcatttattcaaataaattttaatttgcagatttttttctcgaagtctttaagacatgtgaaacacttccttggcaaggaataagctcctggcaagaggagcatgtaaattttaaatcctcctttggagtccaaggaggtatggagaccttccccttactactttcacagtctggaagttaagccatgagaatttgactgaagatttccttctcttaagtctttggagagagataagacagacatggtcta

SEQ ID NO: 54467 - DNA, 293 bp, Mus musculus
  source 1..293: mol_type = other DNA
taaaaattaaggtttgtactctgggtaaaatttagataagatttggcttctgcatctgtcactttctaggtatagtgatactgataaaagtgacttgactaccttaagggacaatttgttactacatatagtttatggaaggacttgaaatctaaaataaatatgaaacacttagtgactatattatgtaatttacattttcaatcaaatacagtaaagctctatagtaacaaaacaccagattgagcactagggttttaaagcttaatacaagtggtcattatgatctcatg

SEQ ID NO: 54468 - DNA, 265 bp, Mus musculus
  source 1..265: mol_type = other DNA
acccctctgagggatgttttaactacatcatgcccattggacttgcaaactttatatgccccggataccatttgaaatgtatatatatatataaagaaaatatctaatatataaataaataaaaattcactcatcttaccatcatatgtgtttgaatggaaattgaaggtatgtttggggcccacaaagtagctctttaaaaagaaaacttgccttctcatgagctgggcacctcccacccaaaaaggggcggagcatccggtgg

SEQ ID NO: 54469 - DNA, 396 bp, Mus musculus
  source 1..396: mol_type = other DNA
ttcagtatgtttacatacacattctttaaagaatgtaattagtgtttcatatttagaaaggactaaataatctcaggaccaggaaaattaatctttcaaagacttaattttcccccaaataaggtattattaattggcaaatattttaaatacattttgagccgctggatcttaatttagtttgcagaaataaaatgacaaaacaaaacatttatgtgttgcaaaaagctattcttatgcaaagtaaaggacacatgttgccttttctgctttccagtttgaaaaaaaaaaaaaaaagcacgttgcttttttcagactgaaacaagtctggggctcttcccctgcagcccccagcatgcgaaggggaggagcttatgcgggaagcgcgcagcagcg

SEQ ID NO: 54470 - DNA, 246 bp, Mus musculus
  source 1..246: mol_type = other DNA
ttagtcttcatgtggctgtcctggaactcactctgtagaccaggctggcctcgagtacttgtgtacggtttgttacaagttgtccctaagaaactatatgctgtaacactgtacactgtaatgatcactcattgggtgtcagctctacttttgtaccctttcacgtaagaagtcttccttatagaagtcttccgtatagaactcttccggaggaaggagggaggaccccccccctttgctctccca

SEQ ID NO: 54471 - DNA, 351 bp, Mus musculus
  source 1..351: mol_type = other DNA
ggccaggcccaccgtggctggggcctatggccatgctgtctggctagtgaagccgctgctcctctggcggccgcttgaggatgcgctcgaagattcatgagaaacaagtggactgtgggtccgcgtcagcgctagcccgggccccagagcccccccaggctgacagaaactgtgttatctcatctctctttaactgctttcatcagtgaagtccacccccctctctctcagggatgaagtggagtctggaatggtcccagtccattttcaatgaaacagctctcttaagacagtcttgtgtgcatacctgtatcctcatttgcatggagaggcatttcaggaatctcaggt

SEQ ID NO: 54472 - DNA, 624 bp, Mus musculus
  source 1..624: mol_type = other DNA
tgagcatttaatttgcctgcagataattacatgcatatgtaacatccgtcaaaggggaacacaatttggactgtttgtgcctccttacttccaaatagggaaataagtgaacatagcttcactggtgataaccaatgatcacaagttggataccattctgtattttccatagtgcaatgctgaaacatctgcctagagctttgagaatcccttttgggaaagaacttgccaggcttcaagtttattatatgtcagaattgagaactccaatcactattttgtttacgtaactaaatcaggtactcacatttcttaaaaattcattatccattcatacttttgaaactttgtcttctaatatctcattgttttatttgtaaattattacttaatctttttaaattcctattttcttctgaaaaataaaacatgataaaaattaaagctagaactttcaaatctctatgtacccttattgtgtacatagaaaaatctatattattgctgtattttgcatgaaacttatttttgaatatttagtcatcagagagtgaggtgggctttgagatttcaaaagcccaaggccatgtcctgtctggatgtaagactaaatctgtgatcatg

SEQ ID NO: 54473 - DNA, 431 bp, Mus musculus
  source 1..431: mol_type = other DNA
ggctggcctcgatcacttttaacagttgttctttaaaaaggtaatacatttcgtgtgtgatcacagcctgggtacaattaataaatgttgcatgttgcagttttctttgaaatatgctttgtatttaagaaatacaatttctaaagctgtgtattcttctaagtattgtataaaaaaaataaatgattttaagaagtctaagatctttagcaactcaattctacaatttctttatgcttacgctaataacaatagcagctaatgttttactgaggtatacattatctgattttgtttatattacaagagcagaaataccacatttcatgcttcttaactacaaaataatttactaaatacacatgactgtgataacgctaacatattttccggggctggtcagcagcgctagaaacattgtttgagcctgg

SEQ ID NO: 54474 - DNA, 340 bp, Mus musculus
  source 1..340: mol_type = other DNA
cttctagcaactgctgccagtatctactgtagtcccaatttaaaactgtaaaacaaagaaggcagtggaatacaattgctatacccttgaacctgtagataacaatgaacaaatatttggttgtctactgtgggcaaggaagtatgtttacttgcaatgaataaactaggtaatagaagctattccttggggaacctccttagaaaataattcacaaagagtaaaatcctttttacttaagggcatagcaattaaaagtggggatccgtgtttatgaaagtgcattagctggaacagtcatccaatcctgataaactgatttgtagaataaagttgatac

SEQ ID NO: 54475 - DNA, 355 bp, Mus musculus
  source 1..355: mol_type = other DNA
cagggagactctgtctaaaattcaaaatcataaataaattctaaagtggctgtcacctggtatattaattcatttagtgattccagtaaatgtagtcattgatagataatattgacacataaacaagagacatgtgtgaaaatcagttaggtcaaacctaattgaaacgctgtttggggagggggaaacaggctgttcagaagacaaagcccaaactcaggcaaaggagatggaatttgtgcctttcaagcttgtaaactggcgcattctccagtttctctggctggccaacctcgagtctccccagccacctctacccccagccgggtgggcggagcttcgcgcgagcgtccca

SEQ ID NO: 54476 - DNA, 473 bp, Mus musculus
  source 1..473: mol_type = other DNA
gtcgggattgagttatcctaacaattcgggtgtttgtttgttttttaaggttaaaaaaaaaaaaaagaaatacctaaaatatttacattcttcgaatggacagaatttaatttaggcaaggcttttgaataacaagtctattcacccactgtgagagcgtgggtaagtaacttcgcttgctagcgcttagcgagcaaagcggaggatccactttgaaagatttccctgaggattacctgagaaatcacctactacctaataggcgcaaagtaaatggaagttgctgcaggctactgcttcctggatggcaaaaaatgccggaaactttgttttcaacaaactagtcctctcactataaaagaacctctttaactttacacaggctaaactggtggcgggagcgcctcaaaggcgcccccaacccacccaaagtgcattgtgggaaatgtagttatttcccagtctggcagtag

SEQ ID NO: 54477 - DNA, 272 bp, Mus musculus
  source 1..272: mol_type = other DNA
tgatcaggggtccctgtgcttcttaggcagagatttcctgtgagttgtcagaccacctagcagggacaggactgcaccttggccaggcttgctcaataaagtggacatattgaataaatacttttttttttaatttgtgtatcagagacaatagtgactaaggtacacgtgtcttcccttgcagtgccaggctacttgggccctggttcacccaggctgtgtttatgaaggcttccttcctgctgagccttggggctgcgcgccaggaacac

SEQ ID NO: 54478 - DNA, 327 bp, Mus musculus
  source 1..327: mol_type = other DNA
gtaactggaagcgttttggcaaaggcccaaaagctggctaatgccatcaggttggcagggccttggggacccactgagccagcaccctcgtctcacgtgagatgaggcctggcagccagtgctgggcagaacctagtctccagcacctgggctcctaaactagaaactgaccacaccactctctgcggaggcggtggaggggtggacatgaaagagcttgtcccagacaagcctggctgcctttgggtactaatgagagccggaattcacacaaatggtgtgagatgggagagagcattgcctgaataattgatgagtcaaggcagg

SEQ ID NO: 54479 - DNA, 354 bp, Mus musculus
  source 1..354: mol_type = other DNA
aagccttgaggacttgtaggactctggacaacttttccctaaagtcttcatgacaggagatatctggtatgttataccttgcaggaaagaccttctctttccgagtatgggcagaaagctttgctccccactccaatctgcctgggaagtacattattgccagaagctgattaatgatccagtctcctggagtttggcctcagcaactgaggggccctagcagtggggttagcacaccacaactcttattgctcggaaagcagccacctgtctggcccctgcctttgtctgactgccagcatttttttttctttctcatgtgttatttttaaagataacaaaggtcaaaaggca

SEQ ID NO: 54480 - DNA, 382 bp, Mus musculus
  source 1..382: mol_type = other DNA
accccagtgctcacagggttgggagtcaggacctgggtttgctgtcaacactacgcttgtcacaatggaaggtgagaacttaactccctcaaattgtgtgctgatcgccacacgtggcaataattttaaagactgttgaaaaagcatggctgtgtgagtttggaaccgcagtcccagagacaccaggtgcatattactttatgcgcatccgagtaaatcagttttctagaaagttcctggtgcttccataagctttcgaagtagctagtgggaataataaaactgcagtccttcgaaattcaaagacttgtcttatcctgcctgttagtcatgaagcctaagtgggactccagaacggccgcctggcctatggcaaacgccc

SEQ ID NO: 54481 - DNA, 312 bp, Mus musculus
  source 1..312: mol_type = other DNA
agtaataatatttttaaggtacagtaaatatgagtgtgaccattggtcttcactcttaaggatatgaccaatgacctcagaactattttttcatgtctgaaagactttacacataaaatggaaggtacaatgagtctttcaactttgaacaccagacgtacctaaaaattaattttttaatgaaaatgccgaaacttgagctctaaagtatttttaaattcggtcggtgctccgcacagctcacagcctaggaatcccggggaatcccatgcttggcctccacggcaggctgcaggatctgttgctgctggc

SEQ ID NO: 54482 - DNA, 385 bp, Mus musculus
  source 1..385: mol_type = other DNA
taattaaatgagctttgtagcttgaaatttccatcttataaattaatacattttcataactttccattaagaacacatacttttaatgcatgtcaagccagcacgttacagattcagctacatcaatgcttttaaacacttttctatacgaagctttttaaaaataagctatgctaacaagtcagatgctcagaactggagttatcgacaattgtgaactgctgtatgggaactgaactccggttcagtaccatatctgactctggcttcgatatatttttataaaatattcaaaagtctgggtacctgactttaaactaataggatttattgatacttagagaaaaatccaagaagccaaaggtgaatcctaggcttatgagct

SEQ ID NO: 54483 - DNA, 328 bp, Mus musculus
  source 1..328: mol_type = other DNA
aattgacaatcagtgactctgaagttctgctgtgagagttacttgagaacactggctgctctccttcagagactctgagcttgtctcagatctaccatggagtcgggtacatactagagatctatcaaatattaagaaatgagctgtctctgctaaagaccggagttgccacttgtttttagtccagttagaaaaatgggataccactttcaagcggcagctggattatccatacacctctgttcccagagggaggggtcctccagggacaccaggggctgttcttagttcatcacctcagcctcagctctggggctgagccagtcgc

SEQ ID NO: 54484 - DNA, 392 bp, Mus musculus
  source 1..392: mol_type = other DNA
gacccgctctcccccgggctcccggacggacccgctctcccccgggctcccggacggacccgctctcccccgggctcccggacggacccgctctcccccgggctcccggacggacccgctctcccccgggctcccggacggaggcctcccggacggtccccacggcctcccggaacgacccgctttttcccccagcctcccggagggacaggcgacctccaaggtacaggctccggtggaaccagtgcctagcagggacccactgctccgctccggacccgctgaaggtactgagttctcagacccggatcgcccccgtctacaaagtgagggccagcagcaacagatcctgcagcctgccgtggaggccaagcatgggattccccgggatt

SEQ ID NO: 54485 - DNA, 376 bp, Mus musculus
  source 1..376: mol_type = other DNA
caccacgcctggctcagagtcacattgtgtgtacgaggctagcttgggactcatgatccccaccatacctggtattaaaggtgtatgcatactgttaaaacagagtctgcactagtttgcacaagtttgcactggtccagttagcgtgtgtaaaaggctaggttagccagattaccttgtaattgtggcagacttaaacactatgctgattttcataatcataattttatcacccagatatttgttgtcccagggtgactcaccttcagtcactttccctccaggtagaaagtaaagtgctttaatttaacccgtttcacgcctctgaacaaagtggttgggcggcaacattcccgccccctgggcaatttaatgc

SEQ ID NO: 54486 - DNA, 244 bp, Mus musculus
  source 1..244: mol_type = other DNA
cggcaagagcactggctgttctcgagaacaaagagaaaatgactggtatctgttgtcactccattgtcaactgtcagccagatggaaagcctaaagtcctctttggaaatgccaattggcacaagaaagtgctgaactgtttacagtccctgactaaggttcagggagccacaaagcccagtacaggactcatttgcatggcccctgacccagtgacgcagctggctcctcctatataaagaag

SEQ ID NO: 54487 - DNA, 319 bp, Mus musculus
  source 1..319: mol_type = other DNA
cccgggggagcccgcagcgcggacagcgggggaactttctggggggtggcgccgccgccgccacagccaccgccgaggcctcgacacttgggtcgcggggcgggcgggcggcggtttaaagggccgctctcggacggccgcccgctgactcggtggctctcgacagggccgcgaacgccggcgctccgggggacacccccctcagcgagcggtggcggtggcggcagcggccccggcggcgacctttggcccactcgggagagccctcgagaccccgtgcggtgagggggcgggggcacgggcggacagataactgccg

SEQ ID NO: 54488 - DNA, 483 bp, Mus musculus
  source 1..483: mol_type = other DNA
agtctatggggatgtatatatactcgggtatagtgctttacgcaataaactggagatacagcgtttggggtctctagccactattggctgcactttgctaagttcagcctggcctgacacaaacaagcctgcaaatttcaaacgtatttaagtcacatttatcagggttcaggcaactggaacttcagctttcttaaaactgagcaccagttcttccaccaggaggcacctgtagtgtcccgctgagcggcggaaccttaagatggcagcatatactgctgtatttcaaatgccctgggttcttgaatggaataaatagaaatttatttgggttttatataaaaaccccctgaatattgtgaacgggttttcatttgtccaagactcaaaaactgctcaaatgctttcgacatgttctaagttctgagacattctaaaaaagctgtcttacggggcatcaccccagggcaccaggctggcccc

SEQ ID NO: 54489 - DNA, 293 bp, Mus musculus
  source 1..293: mol_type = other DNA
taggttaaaagacaggctgtatccagaccaatgggaggctcctggcttccaaacacctgaacaacttgtgcccaagtccaatagaacattgccattctccctttgtcaaaagaaaaaggggttaagagtttggccacagtcttcacacgctcgtgcgcgcctgcctgtgtcttccatcaagatgacagggtgctggatcgggtttctctggtcactcctgccaggggagaaaacatgtaagcgcgcctccgtgagcctaggaaggtggcccagcgccccttctgcccggcccc

SEQ ID NO: 54490 - DNA, 212 bp, Mus musculus
  source 1..212: mol_type = other DNA
aggccactggatcccacaggactccggtggctttaactataccgttgttcctaactgtggactcctcactgagtattttaacagacacagaacgtctagcattgcttcctgcactatggtagaagggcttaccctgagactatgccgccatacaaacgtccaaacaaatagttgggacagtccaagagtaaacctcgcgagactttgagact

SEQ ID NO: 54491 - DNA, 456 bp, Mus musculus
  source 1..456: mol_type = other DNA
accatttgcctgcaagcaaaatgttacatttacaaagtctgagaatatgctcagacatagattttaaggatccgaagtccttaaggttttaaagcaaaggaagtgaaattgtttttttgtaaattaaagttcataaaacatcatttgaaatgagtgggttttttttgtctgactaaacacacttagttcaataaatcttttcagcatttactatgactgtagttcagatttagagatgggaggaggaggccctccaagtacaactttctttttttaaaaagggttgattttaaacaatgtaacctaagagaattgtacaaagaggatttaagtgcgtggtttattattaacacagtagcaaatatatacacagatttgttcagagagaactcagtgcccaataagcaagcgtaaggaggcctatttgcttggtgatgcccagccgataagccaggc

SEQ ID NO: 54492 - DNA, 424 bp, Mus musculus
  source 1..424: mol_type = other DNA
tggtaatttttctctcataattattatatatgaataaatatataaatgcaacccactgagtccatgtagtattatcatatgtatataggggggcatcctgattccgacagtattcttaaaactgactcttcctctgccagcagccatcagttgccaattgcttgtgggctaggggttttaaaagacaatcttgttatctaacttaggtggtcaaaaatgtgcttaactcaaatccagtatattgtaatgactgtcccctcagatgagtcatctgaagttcttagttctcctaattcttattacttcaacaaatattgttatttattctaccactaggaaagaatgagactaaagagactaaatgatttctcaaggaatattctaccttgaagtttgatatttctaataaacaggaaaaaaaatc

SEQ ID NO: 54493 - DNA, 439 bp, Mus musculus
  source 1..439: mol_type = other DNA
atcagtcactttaaaaaatatatctttaacatttttctaatgtcttttttgatattttctataaaagataagccttgcattcttctgctgcagcactatttggaaattcacctttaaaaaaaaatccacattgttagcttagcaatctagcaaagtctcgatggtaattgccattaccatgttattaaagtgacaacatcatagccttactctgatgccactccggagaaatgccagagtcttctttccactccttaaacagtggtagggagggggagtcaagctcagaggtagtactctggtgagggccccgagggacaagatctgtaggatcccagaactctttccactactgacttccaacaggcctggatctgctttcaaactgcaactcccagaagctccaggctatggggatcagtgattggagaatttctag

SEQ ID NO: 54494 - DNA, 336 bp, Mus musculus
  source 1..336: mol_type = other DNA
gaaatgatgtaaacttcttgatttaaaatatgtaataagacatgtaccgttatttcatttatgcctaacaagctttttttcttaactctggaaatttctgagaaaagcggtgggtgttctagaaatatatgaaagttggaccaggagtcgtgttttaacccaagacccggaagccatgtagggcttcgttgacacccgctgccaagccctcgggctggtttacctgatcagttctagtagcctagaaattctccaatcactgatccccatagcctggagcttctgggagttgcagtttgaaagcagatccaggcctgttggaagtcagtagtggaa

SEQ ID NO: 54495 - DNA, 678 bp, Mus musculus
  source 1..678: mol_type = other DNA
ggacagtttctatatacaaacagaaaatgagaaaatattagatatacgtatataaagtaagacaatgaacatatgtatttgtgaatacctaatgtatgtaacaacatatgccatataggatgcattaagtaggttaataatgttaaaaggttaaatgttattgtaacttacttactgtttctatttacatgtattgagtaccataaataatatttgtcacttatatcaaggtggctgccatcattctatttcagaaggacctgtggcaagcaattatataacattataagcatctcatttaaaatgtctatatggagtcaatagtagtttctcctagatgaagtaggcatgcatatcgcttttacacgatgtggactccttggagtgtctttcaggaatttgctaaagaattcttctgaacatttctatgaatccgttttataaggcctcctcatctttctaaaagtttagtgaaaaaataggaagttaggcacacttgggcccttgtgcaagtctattttactttatggaaatatataatgcctacttgcatagattcttgtgtataggtctctagagacctgtgcatgaaactttggaacggttatgtgcagaggaagcagcttcccaaggtagggggaggtgattgacagcaggcagccccgccccgtccccctc

SEQ ID NO: 54496 - DNA, 438 bp, Mus musculus
  source 1..438: mol_type = other DNA
gcttcgtgcatttctgacattcatatataattttctcatgagctaaataatgatgcatatgctttcttgcttttattctattatgctctaagagaatacaggcaaacaaagtgaataatgtttggagtcagcactttctaaaattatcttattttgagtggagacataattatcattccttctgatttttagctctcagaaactgataccttggattataagaaattggtcaacttttattttacataagcatgttgtagaaaattgtgcttttattttgtctaagaggatattaagttcttttgtcttgaaaaaactcataagcactgacagagaatatgtttgtggtagaagaggtcgcctgatgctctatctagaatcctttagctctttaaaaatgttccaggaagctattcatcctagaagtcatttaagcca

SEQ ID NO: 54497 - DNA, 241 bp, Mus musculus
  source 1..241: mol_type = other DNA
gacattttctgctaagaagcacagctcatccccctccggccaaatgggtgtggggctgcggcaacccatcttgtcacgcccttagattctcccaaagggtctctggcgctttggccctgcttccctggctccaggcgcccctccaccgctggggtagctgcctgtggtgcggccgcggctgccttgagcccagtgaagtggggggcgggcagacagggggagactgcctcttctcccccca

SEQ ID NO: 54498 - DNA, 646 bp, Mus musculus
  source 1..646: mol_type = other DNA
ttataaaacggattcatagaaatgttcagaagaattctttagcaaattcctgaaagacactccaaggagtccacatcgtgtaaaagcgatatgcatgcctacttcatctaggagaaactactattgactccatatagacattttaaatgagatgcttataatgttatataattgcttgccacaggtccttctgaaatagaatgatggcagccaccttgatataagtgacaaatattatttatggtactcaatacatgtaaatagaaacagtaagtaagttacaataacatttaaccttttaacattattaacctacttaatgcatcctatatggcatatgttgttacatacattaggtattcacaaatacatatgttcattgtcttactttatatacgtatatctaatattttctcattttctgtttgtatatagaaactgtccctttgtttctaatgattaacaataaaaagcacggaaaaaatagtcccagctcaggtctgtttgtcaatggctttgatgcagacatctgaacaaacgagaaatctttttggttggagcgtcactccctcgcaggttgccggtgcagtgggaagcactggcggagtgatacgcaaattccccagcgccagcggggagggggcgg

SEQ ID NO: 54499 - DNA, 338 bp, Mus musculus
  source 1..338: mol_type = other DNA
acgtaatttcttaaaattttcttaaattttggagagaactctgtaaaaaataaattaaaagatattcaaaattcattacgtggaattcctttaaaccttattagttatggccactaagttcactgcttagcaggattataaatactgaaaattatggaattgaaataaactggaataaaattagtttaaattttggacttgagtttctgagaaatcactattagtcaaattcagtatgtataattcatctccataaatacagacttgtgattcattaaggcagaggcaggcggatttctgacttctaggccagcctggtctacagagtgggttccagg

SEQ ID NO: 54500 - DNA, 407 bp, Mus musculus
  source 1..407: mol_type = other DNA
cgaggccagcctggtctacagagtgagttccaggacagccagggctatagagaaaggttaatcacttttttaaatagactgataagaaaataatatttaacttatagttgtcataaataattgagtatgagtaaaaatgtttagaaacgtgcttgtgatcactactaaactgcactatataatccccccagagaaggctcaaaatggagaacattttagaactttaaacagtttttaaaccccactggccgtactttaaacagttttcagcaccccctgtactttaaaatttttggttcccacccaaaattgaatatttaatattaacttgtgccaagatgtatttgttttccatattaagcttacaaaagcaaggtctggtaaataaacagtttgcaagtaattta

SEQ ID NO: 54501 - DNA, 394 bp, Mus musculus
  source 1..394: mol_type = other DNA
ttttgattcaaaaattttgaaatcattggtttttttaaaaaatggcagtgatatttaaaaatctcaggaggcagaggcaggcagatttctgacttcgaggccagcctggtctacagagtgagttccaggacagccagggctatagagaaaggttaatcacttttttaaatagactgataagaaaataatatttaacttatagttgtcataaataattgagtatgagtaaaaatgtttagaaacgtgcttgtgatcactactaaactgcactatataatccccccagagaaggctcaaaatggagaacattttagaactttaaacagtttttaaaccccactggccgtactttaaacagttttcagcaccccctgtactttaaaatttttggttc

SEQ ID NO: 54502 - DNA, 364 bp, Mus musculus
  source 1..364: mol_type = other DNA
ctttaaacagttttcagcaccccctgtactttaaaatttttggttcccacccaaaattgaatatttaatattaacttgtgccaagatgtatttgttttccatattaagcttacaaaagcaaggtctggtaaataaacagtttgcaagtaatttaaacatcggggtgattttaacaccggactgagagcgcggaagtgcggacatctccggggccagctctggagcagaccatttccagcccccctcctggcgcccgcggcttggccgaggagcaagcaatgagcgagtggcgaatcaggctccagcccgccagcccctggggcggagctcgcgccctccgcccgccccctgctccggagatgga

SEQ ID NO: 54503 - DNA, 257 bp, Mus musculus
  source 1..257: mol_type = other DNA
agccttagaagtatgttttctagaaagggcatttttcagacccaaagacatctgaccatgcacatctgaagtcttccattgtgttggcctacgtgatcaatcactctggcctgatggaagacatctgaaatcttgcttgggcatgctccagggcaggttgccaaagccaggcctgcagggctggtggctagctcttccgcagcccagggtccaggcttggccccagtatgcagccttgctggggcggccagacagtc

SEQ ID NO: 54504 - DNA, 238 bp, Mus musculus
  source 1..238: mol_type = other DNA
gcttgtgctgtaagatcacagattggtaaaggatttttaccaatcctaaatctgagacctgagggtgggattgcaagcttgtacaaccactctatgggcatatactcagaagaagttccaactggtaataaaatgtggtacatttacacaatggagtactacaggatatcatcctgagtgaggtaacccaatcacagaagaagtcattagatatgcactcactgataagtggatattc

SEQ ID NO: 54505 - DNA, 610 bp, Mus musculus
  source 1..610: mol_type = other DNA
tcctacgtattcaaaattaggatccttgtgttttagacttggaatttaaatttgataacagggcttggttttcaaatgtgcttgtattaaattacatttgtaatctcaaaatcttttaccacttttcctgtttgtgaagagttttagaaactaatctttagctaaagtctggaattatatattcttgatagatttactgtaaaaagcaaaaattcttaatactgttattctttgcactttttcataatcattttatacacacacacacacatacacatgtgtatgtgtgtatataatatatatatatatatgttgcttccattgcgttgtacagatgtgggccaccactacaacaaaatgagttctttgtgctctaaaatatttataaagaaattatttaaatgttatgtatatggtggtaataacgaaaaaaaatcatctggtgttataagcaacagcgaaggtttttgtaaaagtttcttttcagtgttctgcaaaataaaatttgaggcaagttttccctgaagttatatgtgagtattctcatgctaccatcttgcctttgaagcgtgaaaagacattaattatcaagtagactactattcagctt

SEQ ID NO: 54506 - DNA, 368 bp, Mus musculus
  source 1..368: mol_type = other DNA
acgtgtgtgtagcagacacagtcattctgtgaatagaatttcttctggataccttttggaatttattacgaacaataatttctcaattagcaatagaatctcacggtactgccctgccttcaggaaatatttcataagccagctggaagatgaccccgggggaactttcatcctgggtggagtcccgggtagcccgctgggctaagccctcgtgggctatccgggctcaagggaggctttaggcgacctgcgacccttcggaagcagccctcctcctttgcagcagctgcaagcccgatcgggctccgccttgggtgggccgagccagaggccgcctgcgattcggcgggctcagccacaccacgggc

SEQ ID NO: 54507 - DNA, 59 bp, Mus musculus
  source 1..59: mol_type = other DNA
agggaaagaggtcaggagaatcttcttttcctccacgtgcgcgagtgcacgcttggagt

SEQ ID NO: 54508 - DNA, 311 bp, Mus musculus
  source 1..311: mol_type = other DNA
gtgcgcgagtgcacgcttggagtaggaggagccggagcggcggcggtggcggctgctgctgctgctgcggccgcctggggagcccagccgagtgccgcctggggctgagcgggtgagtggagccccagggggactcggcggccagtcctcggggggccggacgaggaggtggcggcggggcggagggtggcggccccatggcccggcccctggctggccccgcgtccccgccgcttcctcccgccgcccgcctgcgcctggggggctggtccggagcaggcggagggcgcgctggcccggagggcgggcgt

SEQ ID NO: 54509 - DNA, 202 bp, Mus musculus
  source 1..202: mol_type = other DNA
gtgcgcgagtgcacgcttggagtaggaggagccggagcggcggcggtggcggctgctgctgctgctgcggccgcctggggagcccagccgagtgccgcctggggctgagcgggtgagtggagccccagggggactcggcggccagtcctcggggggccggacgaggaggtggcggcggggcggagggtggcggccccatggc

SEQ ID NO: 54510 - DNA, 365 bp, Mus musculus
  source 1..365: mol_type = other DNA
caacagggttgctttgaggaatactcaaaatagtaccggtaacattttagctttcatatcactgctgtttttgttactaacaaccttacagtaacaaacataagtttttctttgcgtaatattaaatggaaactccagaaatgaagacttgatatgtttttaaattgtgtatcatgccaaactgtgtctcactatggatctccatgtatagcccaggctggtcaggtgctcctgaacctcttggctcagcagcttatcttcatgatagaatttggaagtaatattgtaaaatttttctccttaaatgctctccatgaagggcctccaggaacagctatgtactgcacaaccctaggagggggtgc

SEQ ID NO: 54511 - DNA, 454 bp, Mus musculus
  source 1..454: mol_type = other DNA
agtttatttaatttgtaaggaaattgtcaggattttaaatactaatattgatatggtactaatattgatgtatgcactctgtaagctacaaagtgggacacagatgtttagaatatgagtattatccatttcatgtacaaaacaaatttgggagcttaattttgaggactctgaagaagctgatacatcaaggagtaatgagtctgcaaccttcagaagtactccttactatgtctggccacctcaaattttcctcaaaatatttagcagtcctctcccacagggtttgggagagcaatctctttgtggcagagactagttcctttgtcacttgtgggatgtaatttgtgaggtcattcaacttgcaagggtcccctggcccgcgagctcttcagagcatccactgcagaggcagaggatgggttgcagaagatgcgcgagaccccaacgctct

SEQ ID NO: 54512 - DNA, 455 bp, Mus musculus
  source 1..455: mol_type = other DNA
agtaatgagtctgcaaccttcagaagtactccttactatgtctggccacctcaaattttcctcaaaatatttagcagtcctctcccacagggtttgggagagcaatctctttgtggcagagactagttcctttgtcacttgtgggatgtaatttgtgaggtcattcaacttgcaagggtcccctggcccgcgagctcttcagagcatccactgcagaggcagaggatgggttgcagaagatgcgcgagaccccaacgctctgctgagccgcacactttctcccagcccggtgctaggaccaagagaacttcccgccagcgccgggtagccgggccaagtagggagcggacaggcgggcgggcaggtggccccgggccgccgcgcccgcgccttggctctgccccctggagccaagcgagcctctgctccctcgtggtgcgagggcgtcaagttct

SEQ ID NO: 54513 - DNA, 431 bp, Mus musculus
  source 1..431: mol_type = other DNA
tccaaggtctggacattgcacttattgttttcgagttccaaacccgaaaagatttatatatgttatacaagatatacacattgaattggactttaatatttgtcaattagaaagattaaagttttgcatttttttagcaaaatctcagaaaaactgagctccaaggagcacctgcttgctcacactctctccgccaggaacccggctcccaggaggcgcgagtcgggcgggacccaccgtaggcgccaagccaccaaagctcgtggcgcgcgccgcaggcgggggcgcgagcacgcccgagagccttggcggggctgggcagcccgggccgccgagccgcgtgtgcgcgcagaccgcgagcccccggcgcgcccccggcggccggggccgcagcgtgctcgcccccgccgccagctcgcctcacttatggg

SEQ ID NO: 54514 - DNA, 435 bp, Mus musculus
  source 1..435: mol_type = other DNA
aagttcgtcaaatattgaatcacaaaagaaaattgccttttacaattgttgttgttttttttaatctttagagatgcacacagaatcctgagttcataataagcaatattgctctcataaggaagctcttagctcttatgtaaatgagtaccgcacttcaggtatcaaagaagcctgagtaataaggtggattcattatatcccaccttggttacattcatgagttgccctagtgaagacaaaaattattttcttagtagtccaaacattcagaatgatagtgatagtgattttcctgaggctaaaagaggggatcccgtgtctcctcttcccttagcctttcacttccgcctagttgcaggaaccgcaagttcccacacacacaggagcgtgcgtgcatccccgggccatggggtgcacgtgagcccacactcc

SEQ ID NO: 54515 - DNA, 337 bp, Mus musculus
  source 1..337: mol_type = other DNA
aagagtcactattcattttgacttttacaaggatacacttatctttatttacaaaaagtttaaaagtagagaatttttacatcattgtagttcaaacatacatatacattggagagatttgacataatttgtatgatctgccaaaattctcttaggacacctgtaaatatttgaagcttctcataaaaaatcaatgtactcaattggaagaataattattcctttttgcataatgccttgaaatgtatatttcatgtacagaagactgttttttatcaaaactgctccagtagatgggttctggaaacaaaagattggtccccagtagcccactcag

SEQ ID NO: 54516 - DNA, 317 bp, Mus musculus
  source 1..317: mol_type = other DNA
accttttcagtctttcacagcaaacagctaccagacactgcttggcagaatctcgacactgcactgttgctagaaatcgagcttctagcagctgccatgaaatgttacttgctttttcacaaagtgaatagaagtggctattagggacatgacccccgcccctgggacagaggagttagaaatctatcaggcccatttcctgaaagtcctatttctccttgaaacagaaaggcctttctctggagtgggcatcccatctgcacatctggcagggccgccttccagattttcctcgtgactcaggatcagtttctgag

SEQ ID NO: 54517 - DNA, 421 bp, Mus musculus
  source 1..421: mol_type = other DNA
acctggctcaggaaataaagtttttatgttcaatgacttatacacatttagccttgggaaatgctaatctccttagtatatgcaagataggccatttacacaacaggtagattcttcatttctaatggaacttgttttttttaaattagtttttattagatattttctttatatacatctcaaatctggggcatataaagtttgcaagaccaatgggcgatggctgactaggccatcgctactaactggtaacaggttgctgtttaatttctacattatattcaaactaaatttatcaacatgacaccttaaagatattcctcaaaaatggagggaaacatctctttaattgaagaagagatccgatcctcttaaatcttctctggggcttcgcgcgccagctcaggcagagctgagctga

SEQ ID NO: 54518 - DNA, 347 bp, Mus musculus
  source 1..347: mol_type = other DNA
gcttgttattgtttattacagtccattaaaacaccaatctcaaggtcatcctgagctatatagggttacagcctctgtctttaaaaaacagtccaatatcatttactgtagctgaatgtttctatctatctatctatctatctatctatctatctatctatctatctattgctgacttgcctgacaagagctattcttattgcaaaaggcttgtcacaggaacatctcagacttatcaaacactgaaattgcacttggcaagtttccatactttttgatagctctgaaagcattgccggccatgctgggcagaagcgcttcacccactacgcgtgccgcacgccatg

SEQ ID NO: 54519 - DNA, 449 bp, Mus musculus
  source 1..449: mol_type = other DNA
ataatttcacattttactgatgggtgattaaaatcatgcatatatcttgcattttcattaactttctattctggcttttgtgaatagagcagccataaacacagatatgcaagtgtctctatggtaggttatagtctcctttgggtatacattaaccaatgttttacatcagtctaaaatgttttggagtttaagtgccacttttagccgaaatgttaaaaaatttacatattttttattttctttgaagaagataaaaagaggagatctgtaatttctaagaaacttgatttggcctgctgagtccagccactaggcagaaggttttagccaagtaaaattgccaattttctaagagaaagggctagcacattgctcattagagcattctgagcttgttataaacgcctggcaggaatttcttgcttggagctcagacaacaaaggca

SEQ ID NO: 54520 - DNA, 246 bp, Mus musculus
  source 1..246: mol_type = other DNA
gaggagcccaaggactgactcctacctgggcttgggtgtgtgtgtggggaaccgcattcacacaggcgccctcaagctaggtagctgatgggagctctggtcacctctccaacaggggaaaaatcaaggaggcgcgctccctttctcctcccgagagagaggttggcgaaagcacctctcacctcccccagcccctggccaaagcctagctggccgtagcctcgaggacggggcagcctgcagggg

SEQ ID NO: 54521 - DNA, 410 bp, Mus musculus
  source 1..410: mol_type = other DNA
caagacccatggcttttgtcaaatgtatgcatccatgtatttttttcctgaaaaacagaagagtaagttattatcaacagttgtttcttaaaagatgctgcaatattcaaatgtgaagttgtgaacaaacaacgtatttgttctaagattgttaaaaaaataacaaaaacaagaaaggctgtgtgtacactacttcttactgatgcatttaaaccattgagttcagctttctctgaaagaggtcaaattatgaggtgcactttaggggatttcttcaaatttcttcaaagtcattttgcacataattctaatcagattttcatgtttggtttaaaggtcctgcaatcaattattgaataaggaaaatagtcttttccagggaaaactcaccgattggttgtctaatacca

SEQ ID NO: 54522 - DNA, 483 bp, Mus musculus
  source 1..483: mol_type = other DNA
taatatatatatatatatatatatatatatatagagagagagagagagagagatgctatgcttatagtatatgagcaatactttaatgtttggagagtgattctcaaagagattaaaaacttgttcagtcttacagccattttgtctgtagagtactgacacatatacatctcactgagttcattttaccaactgcttggcatgtgcccacccttaagtgtggtcaatatacaactggtaaaaattaattttccttagtaaatagatttcagttggagactgctttctagttgaactgtacaggtcctgtgcatgctgccaccatctctatgagttcatcagttctgaaagacaggatagatctgtattagtccctacctactaaaagaagattatctcatgatgaattcttttaagtatagcagaatgtcattaagaattattttatgcctgacataagttcgaggccagcctggtctacag

SEQ ID NO: 54523 - DNA, 177 bp, Mus musculus
  source 1..177: mol_type = other DNA
cactaaatagtatgaatatgggcacgtacatgccagatacaaacagagtcacaaatttctctatcagagtattattttccccaaaacaatagataacagtttgagggaaaattctattctctcagagtgcccacacacacacacacacagagagagagagagagagagttggagtta

SEQ ID NO: 54524 - DNA, 289 bp, Mus musculus
  source 1..289: mol_type = other DNA
ctgctcactaatggtgaagaggtcagcttgcccagttacagctgagtgcagagctaatttctgttggagatattttcagaaggaaggaattaaaaaaaatgctttcttaggccttgaaagccaaggggtttcctttctctttttgatgatttgtggcctttaatggttgatcctgtcagagtcagtagttcctgaagtttatgaaccagtaaaatttataagattttgaaagtctgtttattctggtccaaacaggccctgagcagtgtaaccctgagcactgattggc

SEQ ID NO: 54525 - DNA, 592 bp, Mus musculus
  source 1..592: mol_type = other DNA
tcgatggttacataagttgtgacttttaaattaagtataaaaatagacaattattgatatcaagaaatctcattttagctttctactcaatacctacccaataaaattctatcttttaatttttctcttgtacagagaatgaataataaaagttgactttggtataccactcatttgatatttcctaaatagtctggttcagattttagttagaatatattcttaaatggtactaggaaagatacttcacaaacaatgcatttgtacttattaatcatatacttcaaatttattgaattgtaggcaaggaaaatcttgaattaggatagataaatagcatcattctaagagtatcactgtctttacacaatgttgaacagttgtcgctacttaaatgacaagtaaactctagattctcttggaactccataaaattttgtatcagtgttcaagaaataacaggaagttgtacatattacagaggcaatgtcttcggcattatttggcttcattttattatgcaatcacctaagaccatcctcatatactagaatgaatatattgctagtccaatccaaccatgcaatctgta

SEQ ID NO: 54526 - DNA, 602 bp, Mus musculus
  source 1..602: mol_type = other DNA
gaattattctatatctccaggagataaacattttaaaaaagaagcaatatatataattctcaaaataataaaaatttcaaaggtgtatagaaagccttagagttatggaactttctcatttgagcaattacagaatgctttgtaaaaattatttgtagctcataataaacaacccagggtcacaacttagaaataacacatcagaattttctcagctgaaaattagatgctatactatccatacagaaccacaatctgtgatctcagcatgttgcttaggactacatttttgttaattaacaaatggttaacttagtcagcattgttcaaaaattatgtgcagtatactccttcaagtagtacaaactgactgttctatagtgcaagaaaactgtgggcatattatttaaagaaaaaattaactgtaggcagttggggttgcctaaacttggaatatttctagaaagacaattattttaaagttctataaatgttgatagttctgacatttggagaataattggtcaaaagggtggattattgattatcatctgattatcagtactcaatgccattccattcagaacagaagacaaccttcg

SEQ ID NO: 54527 - DNA, 649 bp, Mus musculus
  source 1..649: mol_type = other DNA
tctcattttattgagtaatatgtaaggagacagctttttatgtttgcaatactttcataaaatccaaaaggtcaatttcagatgtaaaacatatgacggagtgcactgtgaaattgtccaaagcatataactttacaggctgcagactggagaggacgagaatctaatactcagccaaaatatttttctggtgacataataattggggagccgagtctaaacatttgtttcttgagaaataccacttgaataatttcttggcctctggacaggataccatgaggctaaaatcatttttaatattttaatgtgtatttcttacactttggtaatacaattatagttcagataatctcagttacagttccttaaattattctgaaagatagattatagaaggttctatatgctgagtcttaaaagatctgcatctctctagggagatgttactggagtccttaaagtaagtcatagctatatacatataggtcaatcttggtgaataattgtattaattgatatataaaaaaacgaagtacaaatgactcagatgtggaagacattcattcagtcatttccttattctcaaatgatgcaatagactatttgccttagacttaaacagaaatctttattgtgaaatattgga

SEQ ID NO: 54528 - DNA, 428 bp, Mus musculus
  source 1..428: mol_type = other DNA
ctatctgcctacaaagattgtggtcagattatggaggcaccacaatctacattaaaacgtctctttaagttgtaaggaatgccatttaaactaaaacctgtatttcaaaaattctttccaaggttgtttgatgatcaaagcgcttttatcatccatggagttcttggaacaacttcaaagagtccgctgagactcactgcaaggagagccttccttgaaaacatttcagaatgcaagttatgccttattactgaaagattgaggtatttgtaggaagtatctcaggtcagttgcctcctaatcctcccaatttgaaagaagtgttttgtttttgttttgcagaaggaaaaggcaaagcactgagacttccagttaacctggtacctcttaagactttggtacccaaagcagcggaccctggatttagc

SEQ ID NO: 54529 - DNA, 304 bp, Mus musculus
  source 1..304: mol_type = other DNA
ggtgtcagagatctgagacttagtgactcagtttattccactttatctttaaggttaagctgttcccaggattgttttaacctatgctcctttaggttaagaacatttcctcagattccaggagaatccagcccttttgagtcacagattagtgtgaacagaattattcagaacccgttaataatgatcaggatttccctagtagttcttcgaagttatccaggccagctgtggaagcagagtagcaggcatgtgaagatagctgctttccccgcccctcacttgggattggaggcgtggtgac

SEQ ID NO: 54530 - DNA, 248 bp, Mus musculus
  source 1..248: mol_type = other DNA
acacttattttatctttaaggttaagctggttaagaacatttcctcacgattccaggagaatcgagccctctcttgagtcacaggattgagattagtgtgaacagaattatttagagcccgttaataatgatcaggatttccctagttcttcgaagttatccaggccagctgtggaactctgtgaaaatgcccctcaggagcagagtagcaggcatgtgaagatagctgctttccccgcccctcactt

SEQ ID NO: 54531 - DNA, 174 bp, Mus musculus
  source 1..174: mol_type = other DNA
ctagcaagattatgcgtagctgtctcttgcattggctggtatagcattgcaaatgtaaattgagattagtgtgaacagaattatttagagcccgtttataatgatcaggatttctcttagaagttatcagcagagtagcaggcatgtgaagatagctgctttccccgcccctca

SEQ ID NO: 54532 - DNA, 389 bp, Mus musculus
  source 1..389: mol_type = other DNA
aaattatttttcttcctgtcttggatagtgagtagaaagaaaagcaccaatggattttaaaactttcttatcacctccttgcctcgggattgcttcagtgtagctaagctgtaagggaagttctcttacactctggcccaagccctgccttggatcccaggagaccctaggaaaagtaaagaatttttttttttttttaatggcaaacctgtcattaaaaaggtagcatacagttccattataaaatggaacctttttttggtacaaaatatgatttttttcgcttatgttaggatagagctaaaacaattcctcagggggaggtttcagtggcagctttcgggaacaggttctggacaagtgcagaagattccagccagactggcaac

SEQ ID NO: 54533 - DNA, 249 bp, Mus musculus
  source 1..249: mol_type = other DNA
cacagggatctttgctgcctggcttctcttcaatatagttaagctctagagccctgacctcaaggttggcttcttaataaaagatgctaaagtaactgtcagtaagaattgattatctcagcagaggccagcctggtctacaaagtgagtccaggacagaggaaagcaatgtagatcatttgtgttcaaagtataccttcttttgtgcaagtcacaagctctgttctttggcctagaacaggagctttg

SEQ ID NO: 54534 - DNA, 364 bp, Mus musculus
  source 1..364: mol_type = other DNA
ttatctgtgacagagataactgtgcaagattctttttttatgtgaataatcactttattatctgactgttgaaattaaaattctttagttttgaaaaataaatatagatatacacctgagaataagacctgaacatctgtttctaccagcccagtgctgtgggtttattttcaccactgtggacattaagagcaagtgtcttaagattcttatgaggcttaattaatcaatgcaaagtaattaactaagcactgtgccaaatatttgttcatttattgaagtgacacaacatcctttgagttgagtttcactaccccagagggagactactttgctttttataggaggctgggatgaaagctgc

SEQ ID NO: 54535 - DNA, 445 bp, Mus musculus
  source 1..445: mol_type = other DNA
aaaaaaaaaatcaattgtttacctgattaagaagggtttaaatctagacgaatttatggattatcctaagaattcgattttgctcatctgagaaatggagccaaagtctgtcttatgctttgagagtcaagacaaacatggctataagggaggatttgaggcagtctccttcctccagactccattaaaacggaggctagctaggttcttaattgcttaacggagaaagttcccttcgggtctgcagaagcccctcagccaccgccaggggccgcagccagagtcctgtctcgatccgggtagggcgttggccagaggcctgccccttgacaaagggacaaaatccccagagacgcgcctctcaccagtttagcccaggctggccttgaattcattactgaccctgcctcgcttgcgtcctgccgtcggagggggcggggagcca

SEQ ID NO: 54536 - DNA, 397 bp, Mus musculus
  source 1..397: mol_type = other DNA
ataaattcgtctagatttaaacccttcttaatcaggtaaacaattgattttttttttttatggtccatggcacagtatttaccacagtgcagactgccagcagcctgaattaaatatttagcaaaataatctcgacttatttttttgtgaccacagaaacagaattaacttccaggaaaactataactttgcatcctaagggttttttttttttccactgaaaattgctacaaagttattcccattcgaatcagcctttgattgggagttactgactaaagatcaaatcccagattaggacaagggaaatgaacatttttcttcatgtcaccagttgctttcaagcaaagataaatataaagctttgtcccaaagaaatccagatcttgcattagta

SEQ ID NO: 54537 - DNA, 536 bp, Mus musculus
  source 1..536: mol_type = other DNA
agaaaaaaagatgtgtatgtatatttgtatgtatatatatgcacatatacatatgatttttaatatatcatctcaacttgaactcaagacccttcaacctcccaagtagtgctggaattatatcagggctttgttaaatgcccgctcccatagtttccaaataattttttttttaattttaaggaatcagtgaaattattttgaaataaaatagaagcatgtagggatttttttattacatttttatttgtaataaataaagtgtgtgtacatgcacatatgtgtttgtgtgcaatcagagctgtgagacaacctgtgggagtaggttttctacctccgccatgtggaatatcatgttacatctactgtttaactatatgtatttaattatttattacatattgtttaaatatatattatatatatgaattatttgagagcatcacttaatgttcagcgcctctatcttaatctctgaggtcattttcttcaggaccccctctggaggcggaaagaggcaggaccacttccggcca

SEQ ID NO: 54538 - DNA, 300 bp, Mus musculus
  source 1..300: mol_type = other DNA
aaattaatggaggaatgtctatcaaagtactcaatgtcatgagtattttgaggaaggagattaaagatagcttttaattttctgttatttcacatgacaacacactacttttgtagtaagaaaaataacgatataaaataaataatttcaatgaatgaatcgttttcttcaacccagggccccattgccccacccccgaggaagggggcggggggtagggggtctgcagctctagtccaggaggctgagatcttatttgaccactatagctggagcagaagtgctgcatttcccctaggg

SEQ ID NO: 54539 - DNA, 526 bp, Mus musculus
  source 1..526: mol_type = other DNA
tataagaaagatcttgaattttatttctataactaccgtgaattatagtttataataagcttttttgttctcatgaagacacccagtttttcaaatgaaaaacgttattgagggtgaatctgtcaatgccataataaaagtcattactttgtacagttaacttacgctgaaaatggtagttttttcaaatgaattgaatcagcaaaacataataaaaccaggatggtccttgtagcattgtttgtaatattcgaaaaacattatacatttctaaaaaaacatatgctactacaaattaaaaaattaatggaggaatgtctatcaaagtactcaatgtcatgagtattttgaggaaggagattaaagatagcttttaattttctgttatttcacatgacaacacactacttttgtagtaagaaaaataacgatataaaataaataatttcaatgaatgaatcgttttcttcaacccagggccccattgccccacccccgaggaagggggcggggggtagggggtctg

SEQ ID NO: 54540 - DNA, 309 bp, Mus musculus
  source 1..309: mol_type = other DNA
agtggaaaagaggaaggccaacttggcatggagctcaccatgcattataaatcctggcatgtatttattgaatatttaccagatgtcaagaattccaaaagtacaagttcagtgttactatttttatgaaattctactgttatcttcatttcacatgaagaagtgaggctgcagtgttagtctcctcactgaatatcatgcattcagattctgctatgtttagtttccattcatcttacagctggatgaaagggaaaggcccgtctccaggcaagatgccagccttatttgtgtgggcctcaatgccac

SEQ ID NO: 54541 - DNA, 330 bp, Mus musculus
  source 1..330: mol_type = other DNA
tacctagcccaacccccacccttaaggtttagacttgaggagaggaattcacttcccagtcaagtcagaagtttcctgaaatggttattaaagataggtttattttctgcagacacaggaatcatcccgtgagactggaaagctgctgaatagacacgtgattccggcggccattgtcttaatagcttttgtggccacatgagtatacacacacacacacaacccgccggcagccaggaggcggggccagcgtgggagcggcggcgaactccgcccttgcgtcttacgcaaattaggcggagcaaagagctgggctgggatccggaagtc

SEQ ID NO: 54542 - DNA, 508 bp, Mus musculus
  source 1..508: mol_type = other DNA
cccattgaaaacaattccttgtcaatctcgtggttatcacaactcaaatacatactatcaatagatttagtaaatgctttgacttaggactttctttgttctaactactaaaatgtcatttgaccacttccacaaaagaaaatatctttctctcatatttgactcaagaatgaattgtgttaagagcactgactgctcttcctcaaaaccatctgcaattggatccgatgccctcttctgaggtgtctctgaagacagtgacagtgtactcacatatataaaataattatttttaaaaaattaaaattacatttatttattgtgtgtttctctttccatcctgtagggctcagggactgaactcagttcttcaggcttggaggcaattgcctttatctgctgagccaattattaggatttactgtggtaagtggtagcatctaccactgatgtgttctggtcttgctgccagccagattggcagaaaactaaaccacgttctgagaat

SEQ ID NO: 54543 - DNA, 430 bp, Mus musculus
  source 1..430: mol_type = other DNA
aatgtggaaaattgtagtgttacccagtagtgttcagctgcctgggcacaacagttggactggttcagtgatcgctacgtgccaagcctagcttagggcccagagcagaaggagggccttaagctcctagcagttagaggtgaaactggccctagcgagggggcgtggccaagctcaaagggggcggggctccaataactgggtctcagcgccgcggtggctgcggctgtctcagcaacggctcgcgcccttcccgcctgccgcggtgcagacccaggacgaaggcggagaagcccggtccagcccggtcctccgcccgcacggctggagcatcgttccggaggactgcccgaaggcaagcctcgcagccggagagcgcggcgcacacgcgcgcctcccggccgcggccgtccctctcctccgcccccag

SEQ ID NO: 54544 - DNA, 360 bp, Mus musculus
  source 1..360: mol_type = other DNA
aataaggtccaagttgtagttaatttcaaattataggcaatttcattttgtctatgcattcattgtcttaagtaaatgttttaccatttgtaaggtggataactttcgttaaaagttgtgcatatcatcttttcaatggaagggaaatttctccctttcagggaactttagctcactttagccaaattctggatactaggagttctggtacaagcatcaaggccttggttctaagactgcatcctgaggccatcgcttcacccccttaaagaggagtgactacgactttgtcatcgcttttgcccctaccccccgcggagtgcgcacgcgcccgcctccagcttcgcgcggggatcgccg

SEQ ID NO: 54545 - DNA, 197 bp, Mus musculus
  source 1..197: mol_type = other DNA
gtaaatgctgcgcatttgatctttcaaagccaagaatggcgtcttggggtttttgagagcccctccccgcgaatagtgactcaatcagtgaattgtttagaacaaaggtgttcgactaacatctgttttattttaagttagctgacgtgtggggcatttcatttaaaaatctaacccctccctcacgtgcagggctc

SEQ ID NO: 54546 - DNA, 376 bp, Mus musculus
  source 1..376: mol_type = other DNA
tgagggtgccaggccccctgttacagacagctgtgagcttggaagagcagccagtgcttcgaaaacaacttttaatacagtttattctataaagtaatgagggatatttcattaatgtcttatggaagcatggttcatgacagtttttttcctctcacagagtgaaagattaaatgataactctgggtctgccgcccggagccacggacctcacctcctctcggaggaggagactagcgaggctccgtgtttacccggggttacggaacgctcaaggtcttatgcgccattgggccacctagacgaggcgcaacatcctaggctccctcaaggtgtcgccccgccccatgacgtcacgcaagagccgccggcttga

SEQ ID NO: 54547 - DNA, 515 bp, Mus musculus
  source 1..515: mol_type = other DNA
ttttcctctcacagagtgaaagattaaatgataactctgggtctgccgcccggagccacggacctcacctcctctcggaggaggagactagcgaggctccgtgtttacccggggttacggaacgctcaaggtcttatgcgccattgggccacctagacgaggcgcaacatcctaggctccctcaaggtgtcgccccgccccatgacgtcacgcaagagccgccggcttgacgtgccgggctcctcgtaagatggcggcgggctcgcccgagagtggcttctcccggcgacctctccggcgggccgccgcaagcctgtctcgcgaagggggcagcgacaaagccacttgccagtgcgcccggcggccccgaccccgacccccagccccggctgagacctcggtctctagaaggctctgagggcgacactgcccgaaagccccgtcagagcccgggcactgcgtgacgcggcatgtggtttcagcattcagcgcgcgccgcctcgggccggaactgc

SEQ ID NO: 54548 - DNA, 220 bp, Mus musculus
  source 1..220: mol_type = other DNA
attgggtctttttagcctcaatatttaaaactggtgactccggaggtattttccccccatgttttgagcacaaaaactggtgtgatgggaacccatcatggccgagatttggcgctgagctgtgtcatcgcgaggtttgagcttcctccttttctcgcgagatctgatagttcctacggcgcatgcgggagccggcggcggcatgctggctccgccccgt

SEQ ID NO: 54549 - DNA, 377 bp, Mus musculus
  source 1..377: mol_type = other DNA
gccatggatggatggcacagaaccatggctgtttgctatgataaaaaccaagtctgtttttaaaaataataataagacctaaacataggacattagttaaataatcaaagggccctctgtgcatcttcttaggttgtacaattcagggtttgaaccaccattctgtaacttttcatttttgttttgaaaatcaaattaattcatttgttaaaattcaaaccttattgaagcattcagataattaattcatttttatttctatacatttacaaatgtatctacagtttatggagtcctccaatcatagatttttaaaatgcatatcaagttttatcccttcagggattttcattgtagagcaatcaaattccgtttcc

SEQ ID NO: 54550 - DNA, 275 bp, Mus musculus
  source 1..275: mol_type = other DNA
cccccatgttttgagcacaaaaactggtgtgatgggaacccatcatggccgagatttggcgctgagctgtgtcatcgcgaggtttgagcttcctccttttctcgcgagatctgatagttcctacggcgcatgcgggagccggcggcggcatgctggctccgccccgtacgcgaaggcggcggccgaggtgcaggagctgcggaggcgcgagcagcgtcttctggtgctgcccgcgggagattcgccggcggcgcctgttaagatggcggcggcgg

SEQ ID NO: 54551 - DNA, 371 bp, Mus musculus
  source 1..371: mol_type = other DNA
taagccaaacccacttacttatatgtaggcacatactgctacacaagtctgtacaaggtccaggaggtatttgtttataataacaggcttgctctaacaaatacttttatttatataaaactttgccttaaaaccagcaacaaaactaaaatggacattggattatagctcagtggcacatggtttgatccaatcacactttctagtgtgttgctagagataaaaaactaggacctcattagtatagtgtatgtaaaggaattggataatattttgtattttgatagtctaggtaagaaataatgactctcatatttgacccagtgtactgtaactaagaaatcagtggattctttctaaatagctggcct

SEQ ID NO: 54552 - DNA, 414 bp, Mus musculus
  source 1..414: mol_type = other DNA
gacaagatgtccaccctcaagttcctaaacattttctagatgaggtccaatctacaatgtgtggaattctagtcttctcagctatacattctggaatgggtttgatttcatcactgaaaaaaaaaaaaaacagcctctccctttagttgtctttttcctaaatgaaccgtgtcctctttggaaatatggaccttgtattacaccctgtgtatgcccaggacctggtaccacataggaatcgatttcatttacacttgaaagctttcctgagaaagggattcagtttctgaagggactcagtttctgtctaccaaaagatctgctagagagcattttctacaaaggataggttcctaaccctgggatctaaacttttcccacagccgctccacctagtaggcggctctgcgtcgg

SEQ ID NO: 54553 - DNA, 335 bp, Mus musculus
  source 1..335: mol_type = other DNA
aggggtggggggcatcgcaatcccacgctgctgagtttgtagtgggcggggcgacgcacggttcggcccataccattcgggccagagggggtctgcgccgaactccgccaactgacagttggagagactcgagaaccggaccgggacgcgcgcagggccacagccggtttcagagccattgggtccaatgatgaaatggtccgataatctgtcgacccagcggcgctggcgtaggaaaggccgcgccttactcctggatttcctgtttccggggccagaaatggtcacttccgcctgaaatccggctggagcacgcgctgggcgctcaggccccg

SEQ ID NO: 54554 - DNA, 234 bp, Mus musculus
  source 1..234: mol_type = other DNA
agtgttcagtacagaattccagttttgaagctcgaaaatggaacggcagtctttaaattctgcttggagatctgttgtctaagagatactagctctggcagaacctcagcaagcgtgggctcagaccccgcctgcttgctctgaccagtgaggggcggggcctgagcgcccagcgcgtgctccagccggatttcaggcggaagtgaccatttctggccccggaaacaggaaatc

SEQ ID NO: 54555 - DNA, 220 bp, Mus musculus
  source 1..220: mol_type = other DNA
tgaagaaagatgttttgacatcaagtctgttggaaatgatcatcaatgatcaaaaaaagacccttgtcaaaaaggccttccttggtcaaaagacccagtaacggggtctgagttgactgagtctgtctcctgcaggcaggctggcggggcaggggcggggggcgggccggcggccggggcggtcccgcgcggccgcgctgcgcagtgactccgcagcggg

SEQ ID NO: 54556 - DNA, 480 bp, Mus musculus
  source 1..480: mol_type = other DNA
agacaggaaggctggcctgtggcctcccaggagccttctgctcagaacagtcaggagcctggcctctggggctttttttaaggaaatatagacagtagaacctgtagaaccaggatggacagtcttcctggacgaacaacctcttgattgtatcagttgttttgtttttgccagtgtagaaaataacagagacctcatatcagaaactgatttggattttatttgatgtggactattctaggacagtcgatgcttgtgaaaagcttctgcttaaagatttctgtatgtacaaaatagtagatttcagattttggaatagccaaattaagccccaatcttgggccattcaaataggctctgtgacacaaactttagatgcacatctcgaattcccacaaggaagaagttccaattgcatcctggcctgcagcccagctggcctggcccctcctccttggctcctccttctagggaagggct

SEQ ID NO: 54557 - DNA, 544 bp, Mus musculus
  source 1..544: mol_type = other DNA
ccggccattagtaataataatattactactagtactactactactactactttgtgaggctttagcctctatgtactgcatatacatggaataaacaaaaatgtaaacatccaggccttttggtttttttgtagcagtagttgctacaaaaatggatacacacatattatacaaagtgtttatatagttacaatgtataccaaacagtcgaaagcattctttaaaatgctgatggccaatgggagaataatgcatagcttctaaaactccacattctctagggagtgaggagtttccttctttcatttaaaaacaaaaacctcagaggaggttcctcgaaatcaccgccttccgtggttctcactgaaaggacctggtgtgtgcgtgcgcgtgcgcgagcgtgtgcgagcgcgcatgggcgcgtactagtttagtctagagactgcgcatgcgcatcacggtcggtaaaaggagaaatgaactattttctcttagcctgagaaatgtttgtcatcacatgatgaaggtttttttctgactcaaa

SEQ ID NO: 54558 - DNA, 258 bp, Mus musculus
  source 1..258: mol_type = other DNA
tccagtattaaattccccaaatctttgctgtgagttaaaggctttatcttcatccttaggagagtttgctcaacctttaaaatacgtgtagcatgacttagtagatgcacttttttataatttctggaaagttctcaactattaaagtctttgctcaaattgtgattacatctactacttctttaagtataatttttgttaaatcagaattcacttttttgattgtaaatattgttcacatctgaactacacagcaca

SEQ ID NO: 54559 - DNA, 461 bp, Mus musculus
  source 1..461: mol_type = other DNA
attgctactggtaacagtcaccaatattatttattgaaaacatgctaaatttaaagatgtaaattcattcccactcctggaggatctgtgctactcaaatttaagatttgttaatagaatgtccttcctgtcttcccttcctttagaagacaagagagatggattttattcgaaataattgttgcacatggaaggcagctgaagactgaccacacctaattaactgtcgggtatacacctttagtcggcaggcctggtttacagggcagtcagccagggctactaagtaggatcaccttattctccatggatcgcagtgtctctaagcaaaacggtgtacacgaaagtaataattctattcagtgatttgaagaaaggactgagcagtaatcctttcctgaccagtgttgttaacggacacataagccaatcacaccctcgagagggtggagcctccaatg

SEQ ID NO: 54560 - DNA, 210 bp, Mus musculus
  source 1..210: mol_type = other DNA
aacagaagtatttcctggaacacagccttaagtatgtgttgcttgtcctggcaaaccccagccgccccgccccagggaggaccttgctggtggctgggagtctcccggctgctcagccccacccgcccctcgggcagggactgttagctaaggggccaggactcctcactgattcccgggccaggaattccttccagcagtaaaacctgg

SEQ ID NO: 54561 - DNA, 321 bp, Mus musculus
  source 1..321: mol_type = other DNA
ccttaggaatgtctaatgctatgtggattctactgatcacaaacaaaataaaatataatattagggtacaattaataatgtgtagacaaagagaattttaaagttctagaaaaatctagcacattagttgaatcacctttttttttttttagaggagttactctttgcatctgctcaccccacaggcacgaggctctctgaagggtgagggggttcctctcatcactgaggggcagtcagcgagggaacgctaccgccagctccgaggcctgcagccaatggcgggcagagcagacgccatgccagggagtgggcggggcc

SEQ ID NO: 54562 - DNA, 480 bp, Mus musculus
  source 1..480: mol_type = other DNA
gagactcactctgtctcatccaggataattgtgggaccctcactgatctggtgatctaaatcactggcagcaaggaacaccaggtgggcagcacacagctttggggtgcccaagtagcgggcagatgggggtcctggtaggtgcttctcccactacacactcccaccgccaccgccggtctgggagggggccagtgttctgcctgctggccgcagccttttgtcctcagaagacacggtcccagcggggcctctgccaagcttctagcagatgctcagggtcctggactcctccctgggaacacaggagccatggcttgggagggccccaggttaggggcactcatccaggctaaccccactctccgggcctggcgaggatggagaagccaggttttactgctggaaggaattcctggcccgggaatcagtgaggagtcctggccccttagctaacagtccctgcccgaggggcgggtgg

SEQ ID NO: 54563 - DNA, 387 bp, Mus musculus
  source 1..387: mol_type = other DNA
agtgcccttgcacacagaaaaagttctaaaacactttgtttgtcatcgacataaaataggctattgagtatcttctttaacttcatttttaagtagaattcatgaatgacattcttgcagtgggttcttctatattttccactttaagaaaatataaaaagaaaggacacccattctccatgcctattaggggttttaaaagtttccttcataaacttgtacaagctgactccacaatgctgtaggcagcaggattctgcggtggcagagcgggctttcctgaagcacttagctgcctttgcaggctgaatgagccacagtctacagcagttttaaaaatcaacattctcattgtttattgttctgtctaaagatgaaaaatcatgc

SEQ ID NO: 54564 - DNA, 418 bp, Mus musculus
  source 1..418: mol_type = other DNA
tgaatatatactaataaaaacgtaaatgcttaatggatataatgataatagattagcagtgtgctatattggaggctgcataataacatgttacttggtaaaatgcgcaggagaaataattaagtgcccttgcacacagaaaaagttctaaaacactttgtttgtcatcgacataaaataggctattgagtatcttctttaacttcatttttaagtagaattcatgaatgacattcttgcagtgggttcttctatattttccactttaagaaaatataaaaagaaaggacacccattctccatgcctattaggggttttaaaagtttccttcataaacttgtacaagctgactccacaatgctgtaggcagcaggattctgcggtggcagagcgggctttcctgaagcacttagctgc

SEQ ID NO: 54565 - DNA, 344 bp, Mus musculus
  source 1..344: mol_type = other DNA
ctagctggcttcagactcacagaatctgtttaaattggaaaatttccaccgcacataggtgtatcagttggtcaagggtggtagcacaccattttaataccactactctcaaagtcagaccctgtctcaaaaacataaaggtaaaaccctcaagtctctgtgtgagacaagatctcactgtgttagctggcggaattaaagatgtcattaatttaaatggaaggtctctgagggccacaaaggaagatactatttctttcttggattgaagatgtcacagacagaaacaggaactgtctgagcctcgtgagacctcgtggcctttgaggagggcacaccgccca

SEQ ID NO: 54566 - DNA, 376 bp, Mus musculus
  source 1..376: mol_type = other DNA
gagcagatactactcctaagggtagcatcggttccgaatccacgtgtgctcgagggccccagaagaactcatactccactggactgctgcggggcactggcttgcctcctttgcgctgttgcccatgatgaagatgagggctaatatggacattaggagacttttcttggtgccctgaaaattgctccgggtaactggaggccttctccacggggctacagaagccgccatcggggtctctgaagcctctgaggcctgcggcgccgactcgtccccgaggcatggctcgcctgcagcacctttgtggcaaggaaccagtcgctttcagccacaaagccctttcccaggcaagctgacttgcgcaaggagtcgccgc

SEQ ID NO: 54567 - DNA, 449 bp, Mus musculus
  source 1..449: mol_type = other DNA
cctgaatgcattgagataactctaggaagaattttttaactgattctgaaacaatgtggcaaatatttagatatatattttcctgattacttgataaaatatttctgagttctggaaagatctcacccaatactagggttactaatataaggggtgaccaaaagtatatgttgccactctgtgtaaacatcttaggatctttcacctttgaccgatgagctctaagtgtttacagtttatccctgtaggaacagcataacctctccactttactcttgagattttaattttaaagcttccggaaggaacactgtagaatttgccatcttagtgaatccctaaccctacaagatcttttaaatctagaatccctttcagaaggggaggcctgattccggggccctggagaggggaggggccagggggcggcccccttgtgaccagccccg

SEQ ID NO: 54568 - DNA, 240 bp, Mus musculus
  source 1..240: mol_type = other DNA
tctttggggcaggccgaaatggtcgaggcaggtaagctggctggccggcctagaaatcgccaggaccaggcgaacacgtagcagggtacaggctctgcgtcttcgggtccctgatgggcccacgaattacaaggagggctggggtcagctgacctcttgcaagccttctcagcccgcctttggtgagactggaagggccccgacattctcttgcgcgcatagcggaagttcctgcgggag

SEQ ID NO: 54569 - DNA, 424 bp, Mus musculus
  source 1..424: mol_type = other DNA
aaaatttgttcatcattgtgatgtagtgcatttgaaacaatcctgtaaatattgagagattattttagataaataacatgtcaggaatagaatgtatctggcctttcggaaattccaaagaccagcacactgcatctatgagttttatgctgttagtttttggtatgaaaatgtaccaaatgtcattattcaaatctagagaattataggttaattcttttaagttatagaggaatgttatgtaaatctcagtatatatatgtacagttcattgatctcttctttgatttattgtatacgcatgcatgtgcacacttgtacatattgtacatttgggagtcagaaagggaagcagataggctaactgcagatcttcaccgaaacaggtaagctgactggcagctcctgcagcagagcacctgct

SEQ ID NO: 54570 - DNA, 436 bp, Mus musculus
  source 1..436: mol_type = other DNA
taactactgcaggttcaaaagactgttgtactctaatagagtcaaactgtgaatggcaaattcagtctttcaaacatttaaaagagttccaagcctaagaagctcttaggtcattgaggttgtcacttcttctccacataaaactctgtatgtagcaagtatctcatgatgatcatcagaaactttaaaattatgtttgcaacttttaaaagttaagtggcggatggcaataacaacttattgagagttttctatgggaaagacagtttaaaacactttagatggattgcttttttaattacttgaactgtcatgcaaagcagcgagtgggcggggccgcgtccatcagtgtctaggtgcccgcaggccgccctaagggccaatggcgcggaaatgagagcccgggccacgacaggccctgggactacggcaggtt

SEQ ID NO: 54571 - DNA, 547 bp, Mus musculus
  source 1..547: mol_type = other DNA
tctgaggctttacctaatattaagagtcggcaatggtcaatattccatttttcaagtttcttacttctgaacagggacaaagacagttaagtctcactgtctgatctgagggagacattaagagttggagctcccttaaacctttacttgatgattaaatgacttgtcctgtaatattatacaatttttatgtggttactaggagtttcaaaaggaccttttaatagtaagaagttaattcccatctaatttatagcatggatcatgtctgaaactttcctgttaagtagattccttgagatacatggctaaaaatggtaatttatgcatggctgttttcaccatggtagtaaaatatgtgctgcactaactagctgaaaaatttgcacttgtttattttgtgtagtgatttcatatgtagtatgcattttacaccagatcttgaatttcaacagtatgtgttaagaatcccttgtttatatttttattatcagattctaaattgaaggtaattttttcaggttctatatgatcaaaatcgcacaat

SEQ ID NO: 54572 - DNA, 205 bp, Mus musculus
  source 1..205: mol_type = other DNA
tgaagacatgtttccattaaaatgaactagagacagactttagaactctattcttagagagctggttgctagtgtcacatgttgccatggagaactgggagggttaaaaaaatccatttgaaaaggctttctacctgcagctgcaggaggccaactgagacggccgccaggggcgagactggctcctggctcctagggcccggga

SEQ ID NO: 54573 - DNA, 446 bp, Mus musculus
  source 1..446: mol_type = other DNA
taactacagtgcatttaatgtattttttagagacatgtaatactacatgaattaagggattattttattgtatggcaaaatcatagtattcctgtcacagacccatttaactagctaaacgctattttttaaaatgccacgttgtttatatatacttttcgaattgattattaggtctttctaaacaaaggtgcaaatccttaaaatgtccatttgtattttcaaactgcccctttcatttttttttttttatcgctgccaatatgataaacccgaaggaaaaatctcattgtgtttattaaagaagctcctctgcagggcaggagttttgcgctcggccgcgagacgctcgctgggctggcgccgcgtcagcagggggcggggcgcggccgggggcggggcggggcggggcggggcgggagcgcgggcgccgcagctgcaggagt

SEQ ID NO: 54574 - DNA, 460 bp, Mus musculus
  source 1..460: mol_type = other DNA
gctgtaagattgcatctctttttcatgcccatggggcctaagtcccaatgaagagcacaacacttgactgtccagtggcaacaaaaacgttaagtgcaggtaccattatatgaaccaatcaggttatgtttagagacatatatgcaataataataataaaaataataatccctgatgaagctctgcatgaataggttaaaatacagaatatcttagattaaggacagattttgttgaaattttttcccttaaaaattcactctgtgataattttacgcacacacatgtaagacatatttttatcatatcaacttgtttgttgagataccatgtacaatttataaaagaaaagatttaattgtcagccactccttagctgcctttggctagggagagctttgctgaccaatcagggctgaggggtgtggcccaccattgttctgacagggtgataagcagg

SEQ ID NO: 54575 - DNA, 311 bp, Mus musculus
  source 1..311: mol_type = other DNA
acaaaataatttagataaggggttcacttttctagttgggttttacctaacatcttgactctagcatttaaaaaacagttgagtgtctaatacatctcatccataatagtgaaacacagtatgtttaattcttctcatgaagaagtgtctagttattttcagctcttgcatacaatctgacttttaggattttgggcattaaagtaaatatacctaatattaagttcagaatccaacaaattcttcattgaaaaattcattcagtgtgattgtggttgcccatagcacaaccaggcaaaatatttactttc

SEQ ID NO: 54576 - DNA, 398 bp, Mus musculus
  source 1..398: mol_type = other DNA
gtggtatcattttgcacataaattatcataggtggaaacccaaattccaataattcaattaataactccattcaaagaaattcagaagctttttctctgttttctggttccttaccatataacatagaatataacataccacaatagtaagatgagtcattgtttgtcttttcaatacagtgaattttcaaagatgacaaaattttaaaattataaagtaaacagaggtcttggtttatgatgaatacaaccggttttcaattttaacactgtaatcaataagtcaaaagggactgcagtgtaacgccaagttacagcaaattagtatttttttaaattaaattgtacaaaactctccatacaactaattagaaaagcactttattaaatgcgctcct

SEQ ID NO: 54577 - DNA, 614 bp, Mus musculus
  source 1..614: mol_type = other DNA
tttggatgatacacctgtgtaagtttcacaaatgttatgggattaacatgcaacatttatactaaactcagtgtccaattgaagttgtaatattagtagacgttgtaaataacattgcttatgtgcacaggcacctgatattagatacttctagaaatctatatattcagatcagggaacattgatattagttcacacttaatactattttgtctaagcttttatgagccatagatgatagagaacatgagagactttaaagtattcagtatgtactgaacacagtgacctagaagctatttacagtttatgctttctagaaaaaagaaaatcattttcaccaaaagtacatcactgtgtacatctactgcactccaggagggatcatgacagggattagtgacatcatttattttaaatatcctcagatttttatttgttttttcctactataactaagggtattataagactttttatgcttttcaagttatgctatataaggaatctttctaaattaaaaatgaaaaaaatatttccagaaacattctcacatatgaaagactatatcttaagtctgagtcataatgaaaacataaaactttttaatgtga

SEQ ID NO: 54578 - DNA, 482 bp, Mus musculus
  source 1..482: mol_type = other DNA
gaaccattagtagtttttcatacagtatgaagaactttacttcataaagtatgattgaaactctttgccataaaacataatatccacatgtatatatacacatacattgaagactataagagtgaagtctgtgctacagaattaaaattttcaccctattggtggtctttgtttctacttttaaaagagtgactaaaaaaaaaatgaattcagaaatatccaaaattgttttatagattatttttaacaaccacgtttgcataagtaatgcatgaagcaaagcacataagaactactatgtacgattaagaatcttacacatggtgcataaaattctgtagctggattcccgtcctcaagaagatgagaacaaacaggagagaagagagcattttttttttttgttggtttttaaaacaaccggaaagagtttttgcataattccccagcttacacggtaggggcggcctctcgcggggcag

SEQ ID NO: 54579 - DNA, 297 bp, Mus musculus
  source 1..297: mol_type = other DNA
ctacattccaaagtagaatgtctgcataggctttttttttaaatgatcctgctcaccacaattaaaacatttgaaattttggtttgtcttcgtgtgcccagattacacacacacacacacacaagctagttggtttatagtatctggttaaactacaagttgacctaggaaagacatgttttcatagcccacaagctagtctcaaaggcaagttaacttaagaacaaaatggattttgttgcttctcctatttaaaaaaaagatgaacaagctctaatatcaactgtatatctaatc

SEQ ID NO: 54580 - DNA, 563 bp, Mus musculus
  source 1..563: mol_type = other DNA
catgattggtcagtcatcttccatcctggcaaagacctggctgactgcaaaacttaactatgtagactaatttatttgtggaagaaatttcaaagttagatataattcagaatgtggcataagaaattttcaggactgtgacaattaaaattgacagtcacctcaaattattatagtatcatgtaacatgtagtcaagcagttccaataaaggctgtctaaatggaaggtccatgaatagagtagttgttccatcaacaagctagatttttcagctggccttatattccagaatcaaaaaagagtaagctttaattctgtttcatttggagtcttcattagaagtgtatcattatacttaaaatgatttaattaagaaaacaatcattaaaaagtttgatcagtcatttgaattttagttaattgaacatgtggtcaagtgaactaccaagaatattcttcacaggttcatttaaaatcaaataggctatttaactcttaactaaataatgcatgtatttttaactaatttgagagacttcatctcacaatttatgttagtag

SEQ ID NO: 54581 - DNA, 360 bp, Mus musculus
  source 1..360: mol_type = other DNA
gataacattttaaatttagccattgcaaatgcaaccataatacagtttctcatgttgtggattactctcaaccataaaattattttgtttctactttttaactgtaattttgctgctgttatattgttatgagtaaatgtctgatatacaggctatgtgatatatggttgtgacctacaggttgagaaccactaagagagaccctgtctcaaaatttttctttagtcatgaaaatggtgacatcacttgagaatggctgctgctctcatcaaggcagcagcgcgcctcgccctaccccgccctccgggtttgcgccatggatctctccggctccccgtccagggaggagcttctgcggac

SEQ ID NO: 54582 - DNA, 350 bp, Mus musculus
  source 1..350: mol_type = other DNA
catgaagggtcacttaagtaaacttgtataattagtagattgtgactcagcacctggccatgttctcataattgatgagtctaggaatgtgccatcatgcctaataggtcttgaatttgtgatctcccagactcagcttaacaagaattaatttttcttactaagcttcatctttttaaaaaccaaaacgtcaaataaatacttctgggaaaataagcagggtacccatattttgaaaagctgctccaatggagggtctcggtctccagtctccagctgcagaccacccctggcggcacagccctaccccgggcagcgcagccccgcccttcctgcagtgaggccctccc

SEQ ID NO: 54583 - DNA, 452 bp, Mus musculus
  source 1..452: mol_type = other DNA
aaagcaaatctttgaagcaaaattaattcccccaaacttctttttgcctgttggaggaaaataaatggttagctatttgctctcaagtttttctgggactgaaaagagctgaaaaaaccaaatatagtcaaccagtatatttcaaaataactgttttgggtgtttccccataaaaaggtaaatgagtcatgttattaagtgcataccttaatgggataagtagatctctgcttggtctaggcagccagggctacacagagaaaccctgtctcaaagtctacattttaagtccttcacaggcacataggttagtgtcagagatggacttggaagtacaccttcaaggacagggacagtcagtgctctggagatcaagcccactggggggggcggagcttgcgcccacgtggcggaggggcggagtggggcggagcaagtctcgcgaggccgcg

SEQ ID NO: 54584 - DNA, 320 bp, Mus musculus
  source 1..320: mol_type = other DNA
cttggccggccaagcgggctcacgacccgcctcttcagacgcggaaagacgcaggctgaagactgcgtgcgccccggctcttgccaggctcaggtggtggcgcgcactggctcgactgcagctccaggggcaccacaggggacctgtgtgcatttggaggctaatgtgtagggtcgctccagagtggattgaactgggcagtggtgcaatcccttcaccactccccccggggagtcagtacttaaccccgggacccttatatcagaacaagagatgtactggtctccgcagccagagtgcgccagccatagctagcaggc

SEQ ID NO: 54585 - DNA, 579 bp, Mus musculus
  source 1..579: mol_type = other DNA
acacattagcctccaaatgcacacaggtcccctgtggtgcccctggagctgcagtcgagccagtgcgcgccaccacctgagcctggcaagagccggggcgcacgcagtcttcagcctgcgtctttccgcgtctgaagaggcgggtcgtgagcccgcttggccggccaagtgtcctcgtgttccaggctggcgcgcagagtcttctggcgctagcgccaccaccaccaccggggtcatgaggagccgcgggggccgctcccagccccgcccgctctgagcgggaacgcggcagtgtcgcgtgtcgccccccaggctgggagccggcggggggtggggaggtcgcccgggcggggtgggggcggcgcggaggccgccaagctggggggctctccgggcaggcgcggcagcgggcaggagggcgtgtctccagccggaggggtccctcccgaggcgcggcgcgggactccccgatggtggtgccgcggctccaggagagctcagggtcttgcctccgccgccgccgccgtcgccgccgccgctgcgggcgccaccaccaccaccaccaccaccgccgccgcc

SEQ ID NO: 54586 - DNA, 425 bp, Mus musculus
  source 1..425: mol_type = other DNA
acagggtttttcctgtgtaacagcgcaggctggccttgaactcagagatctgtaggcacaggtgagtagcaattcacggtgctgtgaattagtaatacctgtatcattaagtaataaaagtccaaatcctttcaatattattgaaatgtcaaagcagcttttcatcatttgaatttgattgtaatcaaagaatgtgtttaatcaatctttctagtggaaaccgtcaaaacacacagggtaaaagactttttactatatcgtttgtggttgataataagcttaattcatatacttaactgtccttcttagcctcacaaagagtactcttcgtcttcctaaaaaaaaggcacatgctatcatacacaacgttcctaaaataaaatgctccaggatatcccaggaactcttagaaggctttaaaaggg

SEQ ID NO: 54587 - DNA, 317 bp, Mus musculus
  source 1..317: mol_type = other DNA
aaatggcctaagggaaagctaattcttttgctcgtgcaataaaggatccctttattcccttgttgaatgctactaacggtcacaaatttgcatgaaaatgtatgctacttgatagaaacattgttaataatcggcttgtactttaagatggccagagctttagcgcagggcgcggccattggtgacgcatgccagggagcccggcgcccgcgattcacacccagcgcttcaagttcggggctggaggcgtccctgcttcctcctctaagaggcgggtcggccccgcccccgcgccccgggtcgcttgcccgcggccc

SEQ ID NO: 54588 - DNA, 603 bp, Mus musculus
  source 1..603: mol_type = other DNA
ttacatttgccctctaatacttagcaaaaattaagtcttattttattaagaacatacagcacagatgtatatatactacatttatacatatataaagagagattatatctattatatagcatatctaattacatatgctacatattatgtataatatataaaatatgtgtgagctatatttttttatattttatattatatcatataattatgctataatatatgaacacatttatacaataaatatataatatataatatgcattacatatcatgttatatattatatattgcaataaagcagaaaatatggtatatttcaaggatgaaagggtgatttaatattggaaagttttaaaaatgaaagtttactctcaggaaaattttctttatctaacatgttaagcatatattaatattttaaaaaccatacttaataacaggagtagttgaatgtttcatgtatttatttattaaatatattaaaggacaaagcaatcaactattactgatattaactgttggcatataaagtatgtcttgtgattaaataatgacgtaagcctggcatgttcagttcgcaaaagaagctttcttgccctc

SEQ ID NO: 54589 - DNA, 301 bp, Mus musculus
  source 1..301: mol_type = other DNA
attttaaatcctggatgccagggaaactttatgtgaagttaatttcagagactaacaaagagccttaggatttggaaaaaaaaaagtctttccaggtacctactaaggttaatgcatgtttgacctacaaactaggacaatggcttatagtttgatgttatggtataattatattattgattattaattaactttaacagctcccaggttactaagcttggattcaagcaactctagataatatagctaaagatagacttttcctaggccagcctcctcaagaagccaggctgatatctga

SEQ ID NO: 54590 - DNA, 456 bp, Mus musculus
  source 1..456: mol_type = other DNA
aagtgcaggttaactctgagagttcaaggccagcctactctgtatagtgaatgccaggcttggattgcatagtgagaccctgtcttaaaataaagaccagttatattttaacagtgtggttctatttacgcagaattcaacattaaaaataaataaattaattaataaatcagaaaagaaattctctggatagactccctcctccagagtgtctgaagacagctgtagtgttctcacatataataaataaataaatctttaaaaaaaatagaaagaaaagaaatgctacgtatttcgattaagatatagacagatatttagttttcaaaacaccgaataggtatgtacttctgactcccaaactcgacggacgacccgagcttcgagcattccggagcccgagcgtcccaggaaaagaagcccgcgcgctttttccggcatatttgccaccggagc

SEQ ID NO: 54591 - DNA, 340 bp, Mus musculus
  source 1..340: mol_type = other DNA
tcctggatgccagggaaactttatgtgaagttaatttcagagactaacaaagagccttaggatttggaaaaaaaaaagtctttccaggtacctactaaggttaatgcatgtttgacctacaaactaggacaatggcttatagtttgatgttatggtataattatattattgattattaattaactttaacagctcccaggttactaagcttggattcaagcaactctagataatatagctaaagatagacttttcctaggccagcctcctcaagaagccaggctgatatctgagccctgcctttcagaggcagccagcctatggcttgttagccttaaag

SEQ ID NO: 54592 - DNA, 736 bp, Mus musculus
  source 1..736: mol_type = other DNA
tttgaagcaaacaatatgtgaaacattatgtttgcaatttgtcacctcttccgttcttatataagaacgactgaacacaaaatgacatcatgtaaaatagatgttgaaggtggccgcgagccatctagtctcctatgggcgtctctggctagatgttctccgcagggtccggaggagtcacctcgggagccaactcagcagccgcgagggcgacagagagaacagtcaggactcccattgtcaccccagcagttctgcggcgtcccctcccccctggtggcgaggagagcttgggacaggggtgctatagtaccctcctccgccaccccgggttgtccgttcaactggtggggcgacccgtctcgctgactctcctggaaggccactgggagcgcggcctaactgaccccggggctgggcgagcctccagctgcagcggctggctccggggctccaggcgctgccgcacacgccctcccggcgcggctccggccgagtgcgacccccggggcgggaaggcgggagcgcgagcagcccacacctggcccgcgagtctgctagaagtcgggcggcggccacgcgcgctggcccacgcacgcgcacagggctcgcgcgcaccggctgccggccctgggggcgggaccgcgcggcggcgagcggggcggggggctcgtggagcgcgcgccccgcacccgagggctgcggaaggaggcccctcgtcatttccgccgggcgg

SEQ ID NO: 54593 - DNA, 299 bp, Mus musculus
  source 1..299: mol_type = other DNA
agccgaacgtacgtatgtgtggctagcttgggccaggaggggatgtgcccatagcctaggcgcgcccacgcgcacccctgggcctccgcctggggctgctaccaccggactgcgcccccagcgccccagctgaggacccaaattttttgggctcgcccttcctgaaagtaggcgaggcccaggcggcgccgagcggccagccagggggcgtgtccggcactggccccgcccctgggtgcgcgcggtggtggcggaggccgcccagcctcgctctagagagacaggtatccggccggggc

SEQ ID NO: 54594 - DNA, 511 bp, Mus musculus
  source 1..511: mol_type = other DNA
atgttaccatgctaacgtcaagtcttggcatcaagtcttaaggatctcatttcaatataggctctttaatgatcttatatccaaacagagtaatatacaagattatttttaagtatcatgcaaatattctattaaagtttggaagaggatggcagaagtgccttctctccttcccccggtgaaagggccccattaaaactcaactgagtcagcaccttgtcaagcctggggctcacttggctaggaagccgagatgatgcccaagccaggtgacgcagggcccgggcccctcccgcccgggcccctcccgcccccttccggacgccggaggccccactccacctactgcgtgcccactggcagcagtgaacgcctccctggcaggcttctccctaggccctaggcttggccacgcctgcgccttagagtcgcgggaggctgggctccgcgggcgggcgggcgggcgggcgggcgggcggggggggaggagggcggggagaagccccgcccg

SEQ ID NO: 54595 - DNA, 685 bp, Mus musculus
  source 1..685: mol_type = other DNA
gaccatcagtgctagtcatcagagacatgtaagaaatgtacactcatgactggaaagcacttgagtgcctaagtcatgattactatttttttgcctatttttataaaccatcaaaaactctagctatgtattttggagtccaatagggttagtctactccctcttaccttaggcttctctagtagaggcaaggagtagaacgcattgtcattgagctagtgaaggtgcggaattagaacaccttcagttcactgtcaaggacaactttatgaaagtaacagtttagttaatatggataatttgataaatcttcctttaggactgattttattttctaattaaaaattacttagtccatacacctaactatggcaaggcatgggtattttctttgtcaaatcttggactatgcaatattttcttaagagtaatatgagcagaaaattattacaatgttgaaacataggtttcaaaatcaaatgctgtccttaaaagttatatacaaggctgaaaattttcaaattatactttaatttcctcaaatgtgctttcaattagaaaggctatatttggtaccaggatcaaatttcttaaccagacttaagacaggcttgaaagagttaatgcttattgagcattattcatgagcaagtgagtttctccccagcacagtgttcacagtctg

SEQ ID NO: 54596 - DNA, 507 bp, Mus musculus
  source 1..507: mol_type = other DNA
gaggccagaccaggcctgggatgtactataaggcccgtggctgcctaggcctgttctacagagtgagttccaggacctccagggctacacatgaaaatggatgatgaaatgcattattttataggatgaatatttggcaaatatataaatatggccctatggcatctgcacatgcatgtggcactggcccatgtgacagtgtgaacacgtgcgcgcgcgtcagacgtgtttaaaccgagtgtgcaaagaagccttttgtaaactcttagagcggacactgcgcgcgcacgttcggcgccccgggtgcgcctttcacagcagcccgaggggctgcgagccgggagcgcggagcccgtgcggtcccttggcgcgcgcacgcctgcgccggctgagcagtgacgcaccggcgagtgcgggagggtccggtgcggcgagcccgggcagagggaggccggcgcgcaaggtgggaggccgcgtgcgcatgcggacccgcgcggggccggtgcg

SEQ ID NO: 54597 - DNA, 295 bp, Mus musculus
  source 1..295: mol_type = other DNA
aggtggacaatccttctcaaggaatatagatgggcccagaggcaggcagatttctgagtttgaggccagcctggtctacaaagtgagttccaggacagtatctgcggatacttctaggccgcgatccaaccggggtgctagccagatcaactcgcgagcgcactttagtctctcagggaacctgggagagcgcagccagcagagggcgctagagagcccgcgggcgccgtctgggcggggctggacccgagcttctcctccttgaaggcccagaccattccggaaggaagtggtt

SEQ ID NO: 54598 - DNA, 525 bp, Mus musculus
  source 1..525: mol_type = other DNA
ggaagaaaatttaacccacttccatttctgtcaaaaagtatagtgtactttaatgtatggccaaagtgaacatttcgagcagctcacttgatgctgcgcttcaggactttttctcataaaagcaagaagaactagagttaactctctagaaagcgtttttttctgttttggaaaaaaatatggtgttttttttcattattgttttttttttaaactaggactaaatcttgtttactgtataaaatcttttttttttgatactggttttcaagacaggattttgaccaggctagcctaaaatagtctttattttgtgtatgcatatgtgtatgcataggttatatgtgcacacatgtacatgtggaagcctcactgaactagatacagacttgcacccgtacgtacctggcttttacataagggctggagatttcgagcaaagtcttcctggctgatgagcacgcatttcagctattccagtaggctagtggcctgcctatttggattacaaatgtacaccatggg

SEQ ID NO: 54599 - DNA, 454 bp, Mus musculus
  source 1..454: mol_type = other DNA
tcttcctaccaccagatggtggaaagcccaggaattcctatggatttctatgtttgaggctcaatagagcacagtgatgcctagccaatctttgtctctggacctagaaacaggtacggaggggcggtggccagcagcggacctgctcagcagcctgactgccccccgcagggaaggggtgtcacctgttaataacagcaggtgtcccgctcttcctccagtctcgaggagtctcgcggcatttcccggggcgtgagccgagcctaggcggatagggggcgaccctctgcggagctccagccgggagagccagaggtgaggggggcggccgagccccgcagacagaggacgagccccagagtcgggctggacactgctcgggccccgcccctcgaccccgcccccgcctggcggccgcgcctctcgggcgggcggagccgctgagcttcgccgc

SEQ ID NO: 54600 - DNA, 476 bp, Mus musculus
  source 1..476: mol_type = other DNA
gcccaggaattcctatggatttctatgtttgaggctcaatagagcacagtgatgcctagccaatctttgtctctggacctagaaacaggtacggaggggcggtggccagcagcggacctgctcagcagcctgactgccccccgcagggaaggggtgtcacctgttaataacagcaggtgtcccgctcttcctccagtctcgaggagtctcgcggcatttcccggggcgtgagccgagcctaggcggatagggggcgaccctctgcggagctccagccgggagagccagaggtgaggggggcggccgagccccgcagacagaggacgagccccagagtcgggctggacactgctcgggccccgcccctcgaccccgcccccgcctggcggccgcgcctctcgggcgggcggagccgctgagcttcgccgcggcggggaggaggggagagcaggctccgaggcggctgcagggcactg

SEQ ID NO: 54601 - DNA, 223 bp, Mus musculus
  source 1..223: mol_type = other DNA
atcttcatattgtaattctatatagttttcacttgttgtttcatatatccataaaactgaaaaaaagtaagtttggatttcactgtagtttcttaagtcacaaggggaactaaaatacctaggagtaatgttcatcatctttgggccatggagaaagtccatgcactaaggatgcagtctatacagaaagcaaatgtgctcagtttgtaagctgagaacatgg

SEQ ID NO: 54602 - DNA, 239 bp, Mus musculus
  source 1..239: mol_type = other DNA
agttggatccaatgtttcccttcagaaagggagctagatccaggttccactcttagaattctccagggatgagcttgtaattataaagttacatggctgtgtaccctgtaggacaaatgtttgggagaataaatttgttcctagtaatcttgataggaacaactgttcagctatgtcatggtgaggatcagcccttgaaccttaggctggtatacaaagaaaccttctttccttagctt

SEQ ID NO: 54603 - DNA, 483 bp, Mus musculus
  source 1..483: mol_type = other DNA
tatttcccaggcaaacaaatgttggcttgccagcacgagtgccaaatgaggcattgctcatcctcctgatgtagagttaaagctgcatgtgcacttagtttggaactgattatcaatatccaattagtgcctagccaaatcgagctgagccctgcaatcctcgcctcggccggcgtccgggctgggggcgctgcgcgggggagccggcagggggcgcccttggcgttgctgccccgaggctctcggcagcgccccctccgcccgtcctgacgtcggagcccccgcctctttctcgcgggctttcaaagggcgctcggggcaagccggccctgagctccgctccgccggccgccggagaacccgtggtcacctgcccgccccggcctctgcgcccgccccctgctccggctccctgcggccgccgtccgtcctccggtccgcccgtccgtcgggaagagcacctgggcttcgaagccgccagcc

SEQ ID NO: 54604 - DNA, 315 bp, Mus musculus
  source 1..315: mol_type = other DNA
tgtcctaatcttaatagtgtttgggtaacaacaacacataaaggacagacaaactgcttgtctattaaagctaaactcttggatgtctatggtcaacgattaatacctcgctaagtagtccaatgctttgcaaggaatatgtgaccttttaaagacaaattggtgtgtaatggaacaaggctgcctgcgggcaaaaggaaggagaggcctcttccccacgccccggggccccccactttcccacgcaggcgccctgggacaattaatttctggttggcctgcgcgactcctcggctccgggcgcctcaaggagac

SEQ ID NO: 54605 - DNA, 540 bp, Mus musculus
  source 1..540: mol_type = other DNA
tataaatagcagatccccaggattgtgaattcaaatcaaaatccaattttggtcataaagaaaaaaaatgctctatttccctgcacgttataagaaatcagaattgtgctttcatattgtaaagcactttgcaaagaaccaggaaggaaattcggacagcttatattttctcctggtctcagtcaatactgtggaaaccttattccagaattctgtctgttaaatgggcctttgaaaagttgtttaagtgagttttacagacctagcttatagtctatgaagttttttactacctagtgaattatatagtttctttcagaaaccactcagcatgcgatgctcaaagtagcctgggccaggcctttgggggatcaaggcgacccctaaaggtggaggctgggtggggaatcgcgccctgctagccgcccagcatcctaggggttccctgagcgctcgccccgccacgccgggcagctgcagagcaggcgggcaagtggtccgggagcggcgggggcggcgcccagcccgcgggagggagga

SEQ ID NO: 54606 - DNA, 440 bp, Mus musculus
  source 1..440: mol_type = other DNA
aatgtaaacaatacactatttccaaatggtgctgaaaatagctctggtttaagtgccactctgagtcaagtatgtgctacacgcacttgaccttgtcacgtgcagttcgaactgacctagtctttaaggcaaaggtaagtttgaagcaattacattagaacagctgcccagtcaaatttatttgtgggccagattttgatggacaatgaagaccttgacaactaatgggatgccaaatttcaaaatatactattataaatgatgctgagctccactatggggactctgtcctcaggtgaggcccaggacagggcggggctatgacggccggtcatccgaaggatgcccaggcggcccagcccttcctggtcaggccatgacaaggactgggggcggagctgcgagcagatcggtaccgcccccccaacgcgttccttccg

SEQ ID NO: 54607 - DNA, 521 bp, Mus musculus
  source 1..521: mol_type = other DNA
aaatatgtcttgtttattgaaaaatcaagagcccctagcatggaatcttgtatataagagaatgcaagaaattattccaaaaatatgttcaaactcagcattcgaatacatcgaaaacttataatcgctaaggctttgattgtacagatgtttaatatatgacttcatctaattccttcagctgtaaggtttacagagcttaatgaatcgcgacagtttgatcgaccaagcatgctcttgtgcacgttgaacatatgcactatgaaagagatgaagtgggttttccccttgaaaataaatatttctccccagttttgcataattgacttccaattttgcagtctggtatcaattcactttttaaaaatacaagtttcttttttctgcttcagaaagctcttaaggcgtattaagaacataattttctactgtgtagactaaacaaatcattttcaaactttcacatacaccctggcttgaatatgtgtcatggtaaatattacacaacaatcaattgcatt

SEQ ID NO: 54608 - DNA, 451 bp, Mus musculus
  source 1..451: mol_type = other DNA
gacctagtctttaaggcaaaggtaagtttgaagcaattacattagaacagctgcccagtcaaatttatttgtgggccagattttgatggacaatgaagaccttgacaactaatgggatgccaaatttcaaaatatactattataaatgatgctgagctccactatggggactctgtcctcaggtgaggcccaggacagggcggggctatgacggccggtcatccgaaggatgcccaggcggcccagcccttcctggtcaggccatgacaaggactgggggcggagctgcgagcagatcggtaccgcccccccaacgcgttccttccgggcgggactgcacgggggccggcgtgaggggtggcctccgtaccccgggggccgcgaccgaaggactctgctcctttagcctcagccgcgtccctttaggcggagacttggagagtccgcccca

SEQ ID NO: 54609 - DNA, 477 bp, Mus musculus
  source 1..477: mol_type = other DNA
ccttgacaactaatgggatgccaaatttcaaaatatactattataaatgatgctgagctccactatggggactctgtcctcaggtgaggcccaggacagggcggggctatgacggccggtcatccgaaggatgcccaggcggcccagcccttcctggtcaggccatgacaaggactgggggcggagctgcgagcagatcggtaccgcccccccaacgcgttccttccgggcgggactgcacgggggccggcgtgaggggtggcctccgtaccccgggggccgcgaccgaaggactctgctcctttagcctcagccgcgtccctttaggcggagacttggagagtccgccccacgaggggggcggagcctagtaaagcttaggtgagctcccgggcagctgctgaccgggaggaagccgggccgcgatagcgccacccccgtctcctcccccgcaccgcccagcggcgcgacactctg

SEQ ID NO: 54610 - DNA, 621 bp, Mus musculus
  source 1..621: mol_type = other DNA
agtttgttgagaatttccattaaaacttttctttgtaaaaggagatcacttattttttcatttgaaattgtagtctctcttaataatagtgactcaatcactttttgatatgataatatgtgtaggattgataatacaaacacatttcttatttgagtaagatggataaaaactaaaataataacagttcaacaaccttttaattccatataccaattaaatgaatttcctttaaattcctaaatattttcagaccctgacagaagctatttaaatatcaatttttgaatcaagactctgatggcagaaaacaaaatgatgtggcattatctatctgagtgactttttaaaaactagcttttagctttttgttacagagagacatatttcaaattaatatcagcataatcagaacatttctaaaattatggttcatattctattaggcttttagcaggtgtaactgacaaaattctgattgtatttgacctttgaagaacaaaagtgattagtaattaaaaacagaattggcatcaagacatttagtgttttttcctaagtaaggttagacatcattactgaagtgttgcatagtgcatatttcctatgagagaaaaattt

SEQ ID NO: 54611 - DNA, 349 bp, Mus musculus
  source 1..349: mol_type = other DNA
agctaatagccagcgagctgctgctattggcatcagctaatgatatcattgcttaaactcagcagaaccatggattaactttggttactttttgatattgtgagtttctttggagttaatcaaactgctgaaacaatattagtcacacaaaatagtttttaacaatttgaaatgtaaataaacaaaataactaataaaatatttttaaaagaatagtttttaacagtgtgcaaatgcatttactttaaacagatgtcttttcagtctaaagttgcaagcagcagtctggtcctgcctggatggagtatagtgggttcagcagcgctgtagcagacagccacgccttaga

SEQ ID NO: 54612 - DNA, 517 bp, Mus musculus
  source 1..517: mol_type = other DNA
aaaatacaaataaaatgtgatttttcctattaacaatcaatttactctttttaaaaatccaaatgcacagttcggtactgtaaatacttccagattttgcaaaataatgtccatgtaatgatagcagagtatgccagacattgacataagtactttttttttaaatgaagggaatcaaatgtgagacacacacactctatctcaaagcaagtttctccatcttgagctacacctctagacttactatgtgttttgcaatctcaacaaaattctatgaagtaaacatgattatcattgttttacagtcagaaaatttgcctagagagccagctccattatcataagtaacgtgaacactgcacacagatgtcaacatgacaagttcttctgggagaaaacactctgttgagcaggaacctgttcaaggtcactccctaggaaatgatgtcggagaaagaattaggggcccacatctttaaagatggaactaaatgaaataagatgcttaagttaatcg

SEQ ID NO: 54613 - DNA, 344 bp, Mus musculus
  source 1..344: mol_type = other DNA
ggtgaccaagcataagattattgctatttcataactaattgtgttattcttatgaactgtaatgtaaacatgtatcacttttcagtggtgatcggtactggctctcctccttttgttaagtaaaacaggaataacagctaattaattccccttcttccaaaatatatagcttctgatacattttgttctgggccagatggcacagactcaaaaatgagtttatttgaaaattatactttgcatttcaaaagtacttacattgtctcaaatgctggcattaaaggcaagcttagcaaggaagagattctcattggtacttttcccctcctacaaaggggagggga

SEQ ID NO: 54614 - DNA, 275 bp, Mus musculus
  source 1..275: mol_type = other DNA
atcacttcaagttacaggctagcttgagctacaagtacattttctgctacagagtgagactctgactcaaagaataggttacaatgcacagtgtaaattggcgtttgtaatggactttattcttttcaaaaggtccattaaccatgaataacatgcttaaaagaatcttattttgctcagaactttcattgatgggctttagaaaaatttgttcaagaaatactttgatgtagttatacttaatcaaatatgttctgtatgtcttaagacagttc

SEQ ID NO: 54615 - DNA, 414 bp, Mus musculus
  source 1..414: mol_type = other DNA
gtttgctgctgcagccccggccgccacggcgggctgccagttcttttatgaatgtgtttgcgcgcgcgtgcacgcacagctgcaacgccactccgctcactggtccccagagagggaggctaggatagctgcgctgcgtggattcccgggccccgcccctcccagcctagcagcccaggttgctagggcctggcagggcaaccaaacctggtgccccaggaggaggcgcgcagaacaagaaatcctggttcttcgagaacgagcggcgtgggcggggcgcgcgagcccgaactcgagcacgagcgctttctcttcattggcgcctattggtaggcggggcgtttgccgattgggccaaatgggcagaaggctgcgcgttcgctccggcgagagggcggggccggaggtcgcttg

SEQ ID NO: 54616 - DNA, 469 bp, Mus musculus
  source 1..469: mol_type = other DNA
atgaaaattattttacattggaggaaatgcatatacttgcttttagtttagtccattatacattaaggtaaaagatagaaaacctacactctttacttttggctaacatagcatattgtgtatttttcaagcaaaactttgaaattggtttcctataggtttctctgaggtgagaaagcacgtgcagttcaacacaagttgaactatgtattcaacccttggatttgtcactaggctaatctcatgtctttaagattaagcataaattaagaacaagaaggagctggaaggcacagctccagttccataggagtacccagcatggaacttgatgctagaccccataagggaaaaaggcttttactgctcaaacgcaggttgctgggtcctgggctcaagctccacccgcggcagcagtcttagggcgtgtttgcagcaaccacgggcacacagcctgctgtgggagggt

SEQ ID NO: 54617 - DNA, 392 bp, Mus musculus
  source 1..392: mol_type = other DNA
agtgtacaaaggactgtaaaattcataccgttctctgacctatcatcctgttttaacaggaaagaggattcattaaaccaatgcagttgcttcctttgcctttttaaaacattttttaaaggatttagacttaaaacaattttgatgaccagtaatgctattgattcatactgttctgggtccataataaatgttaaattaatatgtgaatcacatcttggttagaaatgatattctgtttcctaaggtctagaatggtctccagggagcatgcacgcgcgcgccacacacacacacacacagagagagagagagagagagagagagagagagagagcttgcctccagctccctagccttctccccgtgggcgcttggtgtatatagtaaag

SEQ ID NO: 54618 - DNA, 237 bp, Mus musculus
  source 1..237: mol_type = other DNA
ggctgcccgtgggcagggagagggccagcctccattttgctgaggataagtgacatcaacagaccaaacaaagttttgataggggaggtagcacctccctagggtagcactatgcacccataccgatttttctgcatattttttcccagaagagaaatatgggctggtaacttcccagtttctctggcccaggcccactgagtgcatgcatgcccaaggtggctatggccctttgca

SEQ ID NO: 54619 - DNA, 384 bp, Mus musculus
  source 1..384: mol_type = other DNA
ttgttcactttatgaaatagagttcatttgttcacttaccaaggactgtagttttttataattggagttatcctataagataactttcttgatttttccatgtacagcctcatgtataacttaagatgtgtaatttacatattcacagtagtggacagattatgaaactcacctccgttttattttgagtgtaggtttcattcactacgattgagtgaacctagctttaacaattattaactcttggttctttcagaatgcactggggaaaataaactattctacccaagagtttataatttactaagaagtgacttgacttgttaactatataacacctaagcagtggtaattgaaaagtcatccattctcttttataagaag

SEQ ID NO: 54620 - DNA, 506 bp, Mus musculus
  source 1..506: mol_type = other DNA
tcctaaggtctagaatggtctccagggagcatgcacgcgcgcgccacacacacacacacacagagagagagagagagagagagagagagagagagagcttgcctccagctccctagccttctccccgtgggcgcttggtgtatatagtaaaggccaaccggcagtggcggtagcgacagcggcttggtgacagcagcgacaggggctcccatccgctgtgcacccccttcaggcgcccagcggcgatccaccccgtggcttcctggaggcggcggcccggatcccgaggtagcggctgcgggcaccctagtgctggtcggggtcactcccgccctccccaggcggacctgccaccgggacgcagggggcgcgccgggctgggcgcgcctggcggggccgggcacccggggaggggcctgcctgctcctgggggcaggacggcgcccagaggccagggccagcggggagggccgggcgggggcggggacgcgggccgaggctaccac

SEQ ID NO: 54621 - DNA, 449 bp, Mus musculus
  source 1..449: mol_type = other DNA
tgcagagctcaggtatgcaggcctagattagcccagcccagctctctccagttcagcagccagctgcagggtcaaaatgggaccccttcagcatttaagtcaactttctatcgcaggcccccttctcgactgggccctcgatacagttgaatgcggctgcagcttccccccctcgcacacccccgccgccgccgccgccgccgcggctgctgctttaagcaaccacgccccgcgggccccaggcttcttggccctggggctcgcagcccccgcgcagcctgcacaccgcgctcgcatccgccccacccccgcgcgggcccagccgcccccgcggccagcctggggagtgacgcctcgcgcctgcgcctcgccgacttcctgccagcccacccccggagagcgcgtcagaccctcccgtcaagccgccgagccgttggctcccaggccca

SEQ ID NO: 54622 - DNA, 545 bp, Mus musculus
  source 1..545: mol_type = other DNA
ttcaactgtaggaaagtatatttgtacagattttcatagtgaattatttcaattccatttgatggtcagtgacttctagacactaggccactgagtgaccttctctaacatatcaagaaaaaaataactgttttagtaaacagagttcgtgatatttttaattagcaaaacatatggtgcaaaaagcaagacattttaaatacgaattaatcttgaactaacatggagaactgtacttgaagccagatcagttggttccagcccaaaggaactctggacagttaaactgtactctgggcaagtgtccaatgttccaaattctgagactgctcgaaaatagcgaagttaaaagagtctcttattctcaaattatacttgcacaattaaagcaaaaccacaaagaagtgtctctgattctattccttctcaaactctggaagattttaaaacttttctgacgccgggagcggcctctgtctgcccttcggccctaacgaaacctcctccggtcacgtgagaagacggggctgaagcccctgagaggt

SEQ ID NO: 54623 - DNA, 332 bp, Mus musculus
  source 1..332: mol_type = other DNA
tttggtaggaacttggacaaataaattttggacaaaatgtaaaaaactgttgttttcctgccaaaagaagtgttttctgagccagatgtcttaagaaaagaccttgtctaaaaactctgtgttacagaggtcagtactttcaggacaaatttcagatagtttctcaaggaccttctgaagtaccttcttcaagaaataccttctaccccatcatctctggggtgctgctacaagatgcccctcaggaacacggtgggctaggtgggcgttgcagctctctctgcctggcctcccttgcagagcaggtgaaaggcttgggagggcatgtgccg

SEQ ID NO: 54624 - DNA, 302 bp, Mus musculus
  source 1..302: mol_type = other DNA
ctcactttgtggaccaggctggcctcgaactggacacaagaacttaggtagcccaggctggcctaaatcactatgcattactcccagctttgggttaaactcaggataagccgggcgtggtggcgcacgcctttaatcccaggacagcctggtctacaaagtgagttccaggacagccagggctacacagagaaacccttcagcggagaaaacccttttggcccttagcctcttttccaaaagtagccggacatgacgcatgcgcggccagctgagccgccgtcagagagggtgggccaagc

SEQ ID NO: 54625 - DNA, 170 bp, Mus musculus
  source 1..170: mol_type = other DNA
ctggtctgcatacagatctccaggagagccagtgactgggcaagcactctaccaaaaaattgaagttcatttaccaatgaacatgtagatgggaccgctgggctgcactgtagggagccttcaggggctggcctgaagctagctgaggggccggcccatactgtggcctg

SEQ ID NO: 54626 - DNA, 170 bp, Mus musculus
  source 1..170: mol_type = other DNA
tctgcatacagatctccaggagagccagtgactgggcaagcactctaccaaaaaattgaagttcatttaccaatgaacatgtagatgggaccgctgggctgcactgtagggagccttcaggggctggcctgaagctagctgaggggccggcccatactgtggcctggggc

SEQ ID NO: 54627 - DNA, 358 bp, Mus musculus
  source 1..358: mol_type = other DNA
gatttaacaaaatatattttattacacactcaaggctagcttggtcatagcaagtgagaaatcgctttgccaaataaaatcaggaatttttatctattagtctctaatttttctatatataatttatgtttattctagaaaccctggaactggggttacacatgtaggctgtgacagattttttttttctgagtaggaaattttgttttccaagcctaaatctgcaattccactgcatttcgaaatgtgggctgtgcgcaaggtcttgaagcttgaccttaattgagagtcttaagcttggtttcagaaaccattaatcattacccttaaatagtaaactgtaaagactataaaagag

SEQ ID NO: 54628 - DNA, 465 bp, Mus musculus
  source 1..465: mol_type = other DNA
tagctttctgacacatatcaaaaagaatagataccataaaggtatagccttatgatgtacttgttagtgctagcaaaattctgatagcattttaatagagtatttctagaatctacaaccgttgtatacttcggaggaaatcagctcatatgatttttagatcaaaagaaaataatgcgctttaaatttggtttgaaaaagatcatccattgatctatgtgtgctgagcctgcagctggctccatagtcagaaagagcacatgtgcaccgtacttctggttttcctttcccattttaatacattagtaaagattagaatgaacagcatttattaaatgcctgctattagtgccagcaggcagctgattgaagcgtccagcagggggctcagagcggcagctcaggagagctgccgtttgctagggaagccagtgacgtccaaagcatcctgcctataggattgga

SEQ ID NO: 54629 - DNA, 369 bp, Mus musculus
  source 1..369: mol_type = other DNA
gaaggtaaaagctacatttttagctaagtcttgggtgagaattttttaagtgaataaaaataaagtctctcgaagatatgcactatcactgtcagtggctctgggtgacaagggacactgacatctaggacatcactaatttgttgggtgatatgagagaaaatatttcatctgcctggacctcagagtagataatttctcgctactgagaggtttctcagttctcattaatgaaaggagaggaaattctttatgaagacgtagggattaaatccagcggcttgcgcttgcaatcgaatcagctaggattacaagcctgcgccactaggcccagcagcgcgcgacgcgctggttgctatggaggccgtc

SEQ ID NO: 54630 - DNA, 298 bp, Mus musculus
  source 1..298: mol_type = other DNA
gttttttaacaagtctatcatcattttataattttattagacaactcacatttatcagtagtgttaaaaccaggcagagaactaggttgttaaatcctccagtccgccgcactgctgggggacccacagcttagcctgcaccacggggtcagctaagggcgccgcggagccccatcaccctgccacggaaggagccaggacagccgcgcgcgccgcgtcccggcagcacagcccgaagtacgcaagcgcgctggccacagcctaggccgcttccgggtcacgtggccagacttccggc

SEQ ID NO: 54631 - DNA, 366 bp, Mus musculus
  source 1..366: mol_type = other DNA
agtgttaaaacagaactagttgttaaatcctccagtccgccgcactgctgggggacccacagcttagcctgcaccacggggtcagctaagggcgccgcggagccccatcaccctgccacggaaggagccaggacagccgcgcgcgccgcgtcccggcagcacagcccgaagtacgcaagcgcgctggccacagcctaggccgcttccgggtcacgtggccagacttccggcggcaacagccactctagaggcggttggcgccccctcggcagcttggcgcgcggtctccggtccgcctctccgctcgccgcagcccgggctcctcctccgtccagcctccagggcgggatctgtcggctcgcccta

SEQ ID NO: 54632 - DNA, 389 bp, Mus musculus
  source 1..389: mol_type = other DNA
caagttggccttgaccttagtttcttaagttctaagagtattggattaggtgtgaactaccttgtcctgctaatttaatcctttacattgcaacgtaaaatttccccattaaaaaaaaaggagactgctatagttgtccagctcaacctccgcagcagcagcctgggggtctgcgttccccattttctcgttgcatatgtaaatgtttttaaagatttattttatccctgaaactggagttacaggtatcttatgaaatagtagtaaagctctcattacagttacagctgagccctcctcccctttgcacaaaggcatggggtagcaaagaacaagggtcacaaacctgattcctttggaaccagcgtcgcctaggccttaacgccttg

SEQ ID NO: 54633 - DNA, 271 bp, Mus musculus
  source 1..271: mol_type = other DNA
gccttgcatttaaagtcagataaggccggccaaactggctggaacatgaacccacagttcaagttcaaaggtcaaaatcatgatattctgaaagaattgttacttttatcccagaaacgttgccgggttgaccgggttaggaggttctcctcctcccccccccccccatcccgttcactcagaggcgtgggggcggtcccaatggctctagcagtgcttgaagagctgggggcgtggcttctgggaggcgtggcacgggcgccaaggggcg

SEQ ID NO: 54634 - DNA, 293 bp, Mus musculus
  source 1..293: mol_type = other DNA
ctagagagcttcataggggttggctcccttctgagttcgaggcccagcctggtctacaaagtgagttccaggatagccagggctacacagagagaccctgtgtttcagttcagaaacacgaaaaaataaaagtgtcattactttactttttatttatttatttattttatcctttttcaagagagacactcgatctgtcttctttgagaggcgggctcatagcttgctctcaagccaagctctgatagggggacgtgacgtgacgtgacccagccaggcttcggcaccatggt

SEQ ID NO: 54635 - DNA, 404 bp, Mus musculus
  source 1..404: mol_type = other DNA
ttcgaggcccagcctggtctacaaagtgagttccaggatagccagggctacacagagagaccctgtgtttcagttcagaaacacgaaaaaataaaagtgtcattactttactttttatttatttatttattttatcctttttcaagagagacactcgatctgtcttctttgagaggcgggctcatagcttgctctcaagccaagctctgatagggggacgtgacgtgacgtgacccagccaggcttcggcaccatggtcggcctgtgccagggtctcctcagcggtctccctgtagagctgcggtcgaaagccggagccggagccggagcgagccagagccggattgagccggaaccggagctaccggagggcgggacttccggtttctgggcccaagtcaata

SEQ ID NO: 54636 - DNA, 334 bp, Mus musculus
  source 1..334: mol_type = other DNA
ccataatcagggagcctagctcacagtaagtagttcttagtcattgttaaatagttgcgctgaacaatgttgtcacccttttaaaggccaggacagagcaccatcaccatcgtcatcaccatcaccatcgtcatcaatgatcatcatctccagcgtgaggctttatatcattaatgttgagttttagacagtaagtttaacctagccatcctctagttgggaattgttaaccaagttccctttactctccagaggtgaaaaaggagtctttgaatcagatttctcaaatagatttaattatttaccctaatccgggtcacagaatggttaaagc

SEQ ID NO: 54637 - DNA, 368 bp, Mus musculus
  source 1..368: mol_type = other DNA
catttaattaatttatttatttattgaaaattgttgtagaaccaaatccatcatcttcattagggatctacactgtaacactctagagccagacagcctggatccagggcctgcttgggtccagtttactaggccctggcatggtctcacaagagacagctatagaggtttagctacttaagctcagtttcacactctgtaaagtgatgaaataaaatgttacaacacaaagcactttgagcaattactgctttttcttattggtttagaataaagcgaagtctgaacctggaagacttgtttttctggatggagaaaggtttcataatcataatcaagcaggcccatgagccctgccatttaaagtg

SEQ ID NO: 54638 - DNA, 377 bp, Mus musculus
  source 1..377: mol_type = other DNA
tattacttccttgagttctcagctgagttgtaagcagctgtagactagagtttagcatgtctaattttttaaatgggcagagaaatgaatttatttttaatttttagatgtctttgattggtagacaaagctagattctctccattaattttaagtgaatgcttgcatacaaataagtacctttgccttcgtttttataggattcttaaaaagaaaaaaaagactagcctagtctaaggcctttaacagcttttaaggaacatattaactaaatgatttggccataaaatgttagcaaagctaaggttttctaggattaatgaataacatgtctttatttagtttacttaaaaaaatcattctaaaatatctgttta

SEQ ID NO: 54639 - DNA, 330 bp, Mus musculus
  source 1..330: mol_type = other DNA
taattttttaaatgggcagagaaatgaatttatttttaatttttagatgtctttgattggtagacaaagctagattctctccattaattttaagtgaatgcttgcatacaaataagtacctttgccttcgtttttataggattcttaaaaagaaaaaaaagactagcctagtctaaggcctttaacagcttttaaggaacatattaactaaatgatttggccataaaatgttagcaaagctaaggttttctaggattaatgaataacatgtctttatttagtttacttaaaaaaatcattctaaaatatctgtttatcatgaagagattt

SEQ ID NO: 54640 - DNA, 284 bp, Mus musculus
  source 1..284: mol_type = other DNA
tttaaacatgcaaatttgccgtttccagttctcacagaactatagtatattagtgtttgtaaaatgcttgccatgaagatttatacaaggctggggatcaaactcagctttggaaaaatatttttcagtaaaatctgtacagctcctcttttgctcaattaatagtaattaccaacaggaagtagtcttgctttcttagcagaaagaccatggctttgtttctctcttgattactagaaagagtccgacaaaagaagtcagtaacatctcagaatgatttattt

SEQ ID NO: 54641 - DNA, 349 bp, Mus musculus
  source 1..349: mol_type = other DNA
tgcatgtacacataaaataataagtgataagaatcagtgatatatttgtaacttaccaagatgtgttcattatcaataaaaactggcagtcacatttttttcttggtgatattgctgcagcatacattagcaaaaccagtcatttctttgacataaattaactcatttcttcagtattctgattagatccaggtcccaccagcacgcgctattccgaaggagacattatattgggtcccatatttactgactattgcacacatgggtatgtgcactctggtgcgagaagtcattcttgtcttttccattgcattcaatcacatcaacaaaggccctgcaggacaataaa

SEQ ID NO: 54642 - DNA, 406 bp, Mus musculus
  source 1..406: mol_type = other DNA
ctgagaattgtacgaattcaaaacataatcttatgaattctaatttcattatccaaaatcaaatttttattaaaacacagccaccacactcagcaggcgttgtctctggctgtttctggaaagtaaaaagacatttactgtttattccttttcttttttttaaagaggcatcactttcactctttttccaagaaaagacaatgaacttccgggtaagagtgtgccttctctttcagcaggaacagagattcctgccccattctcattggcaaacagcaagaagcgtatttaattctaaggggctgcagagcacttgagtgtcccatacattcctgggaggcgggcagcgcgcccccaagaggccggggtgcgcatcactctttggaccgactttcaaaagggtgtg

SEQ ID NO: 54643 - DNA, 656 bp, Mus musculus
  source 1..656: mol_type = other DNA
gcttctgaagccacattaagctgggcttagtgatgcagagtcctttaatcccagcactctaggagtcagagacattgggtatctccgatttccaagcccatctgtcttgaaaatggaaaaataaaaaatagaattccacattaaaaagatgtttttttgtaatgaatcttcagaatgcattatattcatgtttgaaattgtcaaagaatatgtttaatttaaaaaggaaaaccagtaacatatgtaaaatatttcctgatacatgcaaataattttacttgttgcttttaaaaaatcaatgttcttcatttggtagaaattattaagcacctataaaaattaattgctatttacatgtgcttttttatatgggagtagattgctttctgtgctgctgacagcagatatctgaggtgttctgggtttcatgttacaggcaacgtgcttaaaaaaaaagcttttaaaactgccctgctcttgctaggaacacagcaggattccagctttctgccaaactctgtcagatttagtttgaatccatagtttagcctgctgtaactgcatggtcataccacctccttataaagcagctagaaccttctggataagaaatgtcgtgatttctagtttcaagtggaagagggaaactttgaaat

SEQ ID NO: 54644 - DNA, 356 bp, Mus musculus
  source 1..356: mol_type = other DNA
tcacaactttttgttttgttttagaaaatacccttaactttaccacaagcttcaagtggatgccagtcatggtgatggtgttgttgcttagaaaacaatttattctagaaaatgcagagattctgtcttcttggccaagcacaatctggctccagaccgcaagacaggtttcaggttataccttgaacttttaaaaggaaagtccatatgtagatctaagattcaaagttcagagtttagtcaatcctgccagaataacaagcagcccccggcccggcccggccccgcctggtctctctaaccggaaggaggcggggagagaccgatcccgcgctagagactgggcgcggcgctcg

SEQ ID NO: 54645 - DNA, 620 bp, Mus musculus
  source 1..620: mol_type = other DNA
gcacaatgaataatttttcaggggaaaaacctgtattatttttcagtactggagatgaaccctaaggcttcataatgctaggaaagcattgtatcaccaaggtcataggaaagctgccctatgacatttcaacaatacaattgctgaaacaaaatttgcataataacaacactaagtgtcattccagtctgcgagaatcagtcttctctggagaccagctccttgattatacacaacactaaatggacacagtaggttatatatattcttagaaaaattaaaatttaaattataaaatgtgatatatatatatatatatatatacacacacatatatacatatatatgaaacattttccgtttgaagtaattatttgtagtctaaatgaattaagtccattccagagagacaagtatgtactttctctcacttgtagttcctagatttcatatagaaacataaaagcatgtacacacatatatgaggaatatgcttaatatatattgcataattgtatggaaaatgtcaatagtaatgcttatgatgaatccacacaataaaattcaaacagtagtaataaagatatttgaattatattttttagtggtaatgatttgtg

SEQ ID NO: 54646 - DNA, 241 bp, Mus musculus
  source 1..241: mol_type = other DNA
gctaatagtttgttgtagtactttataaatctaagctttcacctgtcctgcaagcttggcagcatcatgtcacttacatggcaagtaactcaaaataacatctttccttttaactttctataaccacttaactcagagttcaaagacggttgccctgtggaacaactcaggcggcctcacttggggcgggacaccggtgccaggagggtttctcctttagagaagcgggattggacagtgt

SEQ ID NO: 54647 - DNA, 455 bp, Mus musculus
  source 1..455: mol_type = other DNA
ctgctaaccttccctgcaagctaggattggtagtcgaatagggcacatcctccagaaggagctgcccagatgtcacctgaggacttcattacagtattttctatgattgacacagaatattaccacttttttgcatgaatacaaagaaatatctttgcgactgtagcaatgtagaaatgagaataggctaagaattccttaatgttttcttgtttatacatctgataggttttattgcaatccaatgtaggtgataaatagtatttaaaaaattattacttatgtgtatgggtattttgactccatgtatatatgtgtactatatgcatgcctggtacctacagatgaaactagagttgcagtttagctgccatgtacttgaagtcacgtccacttctctagttgttaaacattgtcataaatgtcaatttaaaatagatgtcatatgatgctaa

SEQ ID NO: 54648 - DNA, 564 bp, Mus musculus
  source 1..564: mol_type = other DNA
tttttaatatggccatgccaaatgcagatggggctcatgtataagccttctttttcatggtaacaatgttcattgtcaagaatgcatgttcagagcttctgagaaatataagatctgctcgttattctcttctttagaagatctcaaatgacaattaactggtaaagaatgtgtaccaggttttaatttctggaaagcttaactcaactcaatgaatatctttgcgtttattatgtatgcattattattatgtatgtatgtatgtttgcagacatatgtatgtgactactgtataatatatgtacctctgtatatgcacatgtctctatgggaaacagtatattagtacttatatatatttttaatgaactatttgtaagttatgaacattgtgatctctcatcatggctaggtttaacaagagatgagatgggcaaaaacagttttaaaaatatttatttattttgtgtgcctttacatttgtacatatgtacattcacataagggcaaaagacaacttgttggaagtttgtttcctccttcgaactcaggtcatcaagcttg

SEQ ID NO: 54649 - DNA, 321 bp, Mus musculus
  source 1..321: mol_type = other DNA
cacctatgtcattggccaatatgttcatagcctgtgaggcatgaacatgtacagcatctttccagtgaaggttggaaaggtctcttaacatcctttaagtagatactcagcttcgaatctccgccgggtctctgagagctcacctgcaccggagcgcacgggccctgggcctggaagctgtcttccaggctcacggcccaggcagcgatgaggtgctgctcacctcggccatggtcacaacactgtccaatcccgcttctctaaaggagaaaccctcctggcaccggtgtcccgccccaagtgaggccgcctgagttgttc

SEQ ID NO: 54650 - DNA, 571 bp, Mus musculus
  source 1..571: mol_type = other DNA
tggatacgcgtgcctgtaatcccaacagtcaagagaccggtggtgtcaacaacaactagacagttcacgtatttttttttcaatattaactctttaaaatgtactgtggaatttagttaagcacatcgaaaattctcacatttaagtacctcaaaatcacgtgtgccttgaagctacaagacactgcagatacttagcatatagtagacatctggtatatgtttgctaaatattcttttatactactttgattcaccaatattacaggaatgataaggtaataatgtcccactactgacattgcctaattatcttagttttcctagtaataaattcctgcaaaatatggcacattttgccaaataagcccacttggccttctagtagttcatctttggttactagcaactctagattaaggttcataaatgtcaagctgacacagatctgagtgaatctgtattttcaaaacaatttctcaccttccattttagttaagaaagtgaaaagaaagtagtgtagccactgacacgacgttacgtcacggataaggcgggacttggcaacccga

SEQ ID NO: 54651 - DNA, 607 bp, Mus musculus
  source 1..607: mol_type = other DNA
tgcagtacatacacaagatcaagtatttttttttaactctagacttgacaggcttattctaaactgctgtaaaggccaagctgacatctgaagttagatgaatttagaaatccttacaagttaaacattttagttaacaggtttatagcaaatctctctatggaggaacctttcagaaacttgctcctgacagctgtacttgccccacagatcagcaaaactagtggggcttttctataaaatgaagctccgtgcttctcaaggagatgcgcttttgccctctttgagagcatcaaagggcaatggcattgcaatgaagatgcactgcgttagcgacctggagaacgccaagcctccgtcccagtgcgcggaggtcccctccaaggggacacgggccggggggctgggcgtgctgtcccgagtcagggcatcacgggaggcctggatgcccccgcggacccggaacgcccgccgcctgcttccctccagagctcacctgtagggaggagccgagatgagaaccggccgcctctttaatctgcgctcgggagcctcagcctgggagtcccaaaatcactctcgcgagatctgaggctatgctctcgcg

SEQ ID NO: 54652 - DNA, 375 bp, Mus musculus
  source 1..375: mol_type = other DNA
ctgctaccttaatgaatgaatttaaatttacacttgtggaatgtcctgaatttcagaaggtggaactaccttcgcccctccacggtcggactcctcggcccgggccggggcgcaggaggagagggagcccttgacctcggaatccagcttgtctctggggacctaggggacagccgcgcttcctcccacggtatgggaagggtgggcgggagggccccgaagcggccgctcagtcggcgccgcccgccgcctgctccgcccgctccggccgctcggcccgctcggccggctcagcctaaccgcccaggctgcctgcgcgctcttaggcgagcagtcccggccacgtctcgcgagagcatagcctcagatctcgcg

SEQ ID NO: 54653 - DNA, 458 bp, Mus musculus
  source 1..458: mol_type = other DNA
tcatatagcctatgtaccaactccctatgattgaacagatttgtatatcgataaacctaaatattctgcacacataaaaatagattcctttttataagaaaaaaaatcattgaaattcaaactggaactcagtatttattatgagccttattttcataattattctaaaatcatacttgtgagaaactttgctaactgtaatctttctggcgcctgacattatgtatgttgtggatcacgaaagtgaatgtcttctcttagaaactaaacataatctatatgtttatggggagctaagaatctttctttattcctcatataaatcaaaggaatagggtttctctgtgtagccctggctatcctggaactcactctgtagaccagactggcttcaaactcaatagtactcatatgttctctactttaaactttaagaataaattattattttgtgacca

SEQ ID NO: 54654 - DNA, 507 bp, Mus musculus
  source 1..507: mol_type = other DNA
atttattatgagccttattttcataattattctaaaatcatacttgtgagaaactttgctaactgtaatctttctggcgcctgacattatgtatgttgtggatcacgaaagtgaatgtcttctcttagaaactaaacataatctatatgtttatggggagctaagaatctttctttattcctcatataaatcaaaggaatagggtttctctgtgtagccctggctatcctggaactcactctgtagaccagactggcttcaaactcaatagtactcatatgttctctactttaaactttaagaataaattattattttgtgaccacagactaggatcttagccttagcggttgggctcgcagccgcaggccacgcccacaggaaagaccccgacctacagctcctggcctggtgctaccgccacaggcccctccccgcagctcctggccccgccctaaagacttaggtcccgcccctgacccgggtctggttttaccactccggcct

SEQ ID NO: 54655 - DNA, 479 bp, Mus musculus
  source 1..479: mol_type = other DNA
agttgacaggaaggttcttctcttcctagagaagccgaaagattttaaatgcccaacgcagttaaaccattaattcgcttaaaggagcctcctttggctgacacaaatctgtggtctccaagagcttacgatctagagagctggttagctaactatggacacctccagatctgattccacccaggactggagggtgtcaccccagttggtggtctgtggattttaaaataacactagaattttcaagagactgaggcagagctgcccaatctttggacaatgacccactcctcagtttctttatctgtacaatgggtggtgagtaagaccttaagcaccggcctcagcgcggccacggccaaggccactgccccagcctggccctcgctccgggcgcacaaagcccccggcgctgacgtcagggcccctctcggcacggccggcccccagtgcaggcggagctgcgcggagctcccacc

SEQ ID NO: 54656 - DNA, 389 bp, Mus musculus
  source 1..389: mol_type = other DNA
cactgtggttttaatccttgaattgtaactaattactgaatggttactacttaggcatgacagtaattatggagagagtcttactatgtaaccctagctggtcagggtttagccatttttatattgatttaaaaaaaaaaacccaaccatttattattacagaccatcacagccacagccagtatttttgtcccatctgttttactggtttgacggaaactaaaaaaacgcagcagccgggttactctgcgaggcccgcggccgctctgcgcaggcgccaaacgcccacgttccttaggactggtgcaggctctgtcgtccggccccgttccctccaggaggaggcggcaccgcccactggagggcggcgcctgcgcttctgggcgggc

SEQ ID NO: 54657 - DNA, 391 bp, Mus musculus
  source 1..391: mol_type = other DNA
caaccacctgccacttgcaggcacaagcttggtatctgtaattactttttagtagcaagtgggtccctgcgacttacggactcaggtgccattttgaaaccggcacatatgtgttgcagggaaaaccttcccttcaaaagcttggctcccattagcaatcacttttaattgatgaaaataagaaaaggaaaatgaacttccttattgtcagtcagtaacagaagttgactttgacaatacaaatctaaaacttttcttttaaaaatcctttatcgccctctcaaatcaaggagtcattggaatcagaccccagcaccttaggtgccactcaggccattagtgttgggagggggtctgacagcctccgaacgcccttccggagatgcggcgc

SEQ ID NO: 54658 - DNA, 329 bp, Mus musculus
  source 1..329: mol_type = other DNA
gataagaagaaccagtattccttctgctacaagtcagaatagaaggaattcttataaagtatcttgctttctactgttgtcataaaacaccaagaccagtttggcttactcatcctgacccggcacaagaaaatatcctgcgggacttgcttatttgatgaaggtcaagttgccagtggctactacactacaatatcatttgaagttacatttgaactgtcatcttatgatttcccttgtgtggggaaaacctcgtgggtcgtcctggaggcgggtcccagccagatgtgctcagttgccacgccctcgctggtgcaccggagcgcttc

SEQ ID NO: 54659 - DNA, 570 bp, Mus musculus
  source 1..570: mol_type = other DNA
tgatatcatgtatatccttacatggtaactgaaaaacaatatctcacaattatttcatttataaaattcaaaacagaataatagctgagggtagattttactatgtacatggtaatcagaaaaaaattagaattagtttttcaacatgccaaattgccaaatgttcctttgtaaatttttggtgccctggctccaaactcaatgaggaattcttttatttttgaatgaacatttattgaccttacattgcatgtcaggtgctgcatgtagaagtgccccagctacctatgcagcatggcaaagtatatatgagttacatacctaaagataagtttcataaatcccaaatttgatacaaatttatggtacaggtgtttgctttttaaaataatttttcatcaaaatattattttctccatagacatgaagatgtgagggttctatgaaaataattttataaatgacttttcctctgaattcagtttcgaaatttttaaagcatagccaataagtgatttggcaacagttaagaaatcataaacttctgcaaatccattgctagattttgct

SEQ ID NO: 54660 - DNA, 261 bp, Mus musculus
  source 1..261: mol_type = other DNA
tttcttttatgccagagaaaatggtcatttgctgtatgatcaattgatatgaacacattttttatgtgtcttcccatagccagtaacagttgcagaaatctgaaaatattctgaatccccgaagcttccaaatcaactgctctgggctagatgaggaaatgcctccatgagatctaaggcattttctcaattagtgatcaagcaatgtggaagtgttcttggtcatgatgtctgtgcagaaatagaaaccctgactcatgt

SEQ ID NO: 54661 - DNA, 485 bp, Mus musculus
  source 1..485: mol_type = other DNA
ttggttaaattataggtatattaataactttaaacaaagctacaataatttaagcttgtccacaaaattctaggaatacttctcttagggacactctgagaagcaaataattctttatattctccagaatggaagtattgctgatttttggaaactaaatgcaagataaatcttgactcatttcgaagatatttataatttctagagtacaatataacaaaatgtcaaaatgtcaagattgtcaataggtgatgatgatggagaatgtctctaacctcagtactatgcagggtagagatagaaggatttctaggtttagttgaccccagtctagcttcagattccgtaagagactctgtctaaaaagggtacagtagagaacagggtgtgtacttgaaatcctcctctacacttataaatccctgcttttaaacaaaaggacaggttgctttatgtttggatttagaaatgttgcctcaactcta

SEQ ID NO: 54662 - DNA, 329 bp, Mus musculus
  source 1..329: mol_type = other DNA
tgcaactgaccacttgaaggtggctgtcatcaatgactcctttttatataataagaaaaaaaaaaaaaaccaaaattttcagcttttgttgaaaaaactggaaaacaaaatatttgagctaattttgtaaaatatacatctaaattaaatgacagagaaagagagtgcacttgaagcccaggtatcacctctgggctgtgaggcaccacatggccctttcctgcaatggctcacttgacctccccatttaaaggcaagtcggaagtggagctcccctacggagcattgggtgcttcgggaccgcctgcgtgggcagaagcagcctccca

SEQ ID NO: 54663 - DNA, 353 bp, Mus musculus
  source 1..353: mol_type = other DNA
attaagattttacttaatgtcttatgtcaaagatggatgaaagtcgttttttaccagtaaaggagcaaaactgagttcctttgcagcataaatttgccattccatagggccttggcaaagggagaaaaaatagtcagctcaaggtaacaactttttggcatttccatcagcagtgctcaaggaagtgcagtgccatgtaaggggaatgcagaggatggctcagcattagtgtcaggtccaggtgcctttagctctagggctttggaagaaaaagctcctccacagaggctgctgcagctttaactttgtcagcgcaagcaggaggagagagagctagcagagagctttctgtg

SEQ ID NO: 54664 - DNA, 432 bp, Mus musculus
  source 1..432: mol_type = other DNA
accaacgctgctgtggtgctgctagcagagggaactcttgagctctcaaaactgaaagcctagggccgcggtcctgcagcacgctaaggactgttggagcagatctaaaggatctggaggctcccggagcgggtgacaggagagtgccccctccccctgggcgggtgggggtaggggcgtgcgcgtgtgccaagcttgcccgccgcctcttcggtgcgtgggaccctgggccccaaaggctgggaagcaggagcagcacccctcaccctagcctctggtcctcagggcgcctggcggtccttagagccaaagctctcagggcggggcgcaggacccgggccgtgctccccgcccccgctccttgtgcgcttggggatgcacacgcagctcacggccggaggggggtagcagccgccgcctccaggtactggc

SEQ ID NO: 54665 - DNA, 274 bp, Mus musculus
  source 1..274: mol_type = other DNA
tttgctttaatagtaatttaaattttatggctggacaaagctgatcctttacctttcttctgttactagggaaatgtactcagagctatgagttttcctcttagaaatggcttcattttcattaaactataaaaagtctttaatttctgtctttaagttatcaatgttctgtagatatctgttaaatccatttgtttcccactattattgtgtgtttactaaagtttctttaatgaaagatattcagaaaaagtcgattttattcgatattaga

SEQ ID NO: 54666 - DNA, 463 bp, Mus musculus
  source 1..463: mol_type = other DNA
gccagctctgttaacagcagtctcaatggtgcttccactcttcaggaggttttgagccactgttaacgaccctttcaggacccataaggggcctccaggccctacctgctggtcctctcggaccacactcatctgcgcgcagctccgccgagggggctgacgcgcgcgcgcgcggccaggcagctcctgggggcagacgccatccagcctcctcggcgcctggtgactaggccagagagcgcacgcccggggtgacagctcggcacacacgtgggcgcagcccgtccgcacccctctctgagccccagaggggacgggcggggacaagccctggcggggccgcgcgcttccatcgccactgccaaggtcctcgcagtggcgcgggaggaggggccgagggcggggcggtcgtagcctccaccactcccgggcccccccggtggcggagcgccgcctccccggc

SEQ ID NO: 54667 - DNA, 338 bp, Mus musculus
  source 1..338: mol_type = other DNA
tggcggtttgagcgctgggcgccaatcccggcgaccggtgtaggaggactgtcgcctgaggttctcgccacatgcagctcgcactcgcctatccagcttggtcagcccaggctgagcttggaggactgggcacctaagtgctccagagcccaaagaaggtaaaaattcagcgcgctgggggtcgggcggtgtttccagccaccaaggaatatccctccagcttgctctatcgctaggagatggaaggactggctagctaggcaagacactaactcccagaggtctcagggctgttctctctaaactcaagagaccaatcctgggttggttggtgtttt

SEQ ID NO: 54668 - DNA, 318 bp, Mus musculus
  source 1..318: mol_type = other DNA
tctagagtctccacacagtctccagattttttttaatgaggtgttttaaaggacagctttccatggaaagtctaggactagcccttcagcaggtttccctacatttagtgtaagagatctcgaagagtctcagcactttgagactcagcaccctcccttgagaagggtgggaatcgccttggcagacccagcttcttcaaaaaatatctctcgaaaagctcttcggacattggccagcctgacacctgtcttctctgtgactgcagcctccaacagctggcagcggccactgcctcagcaggggcccgccaggagcgg

SEQ ID NO: 54669 - DNA, 458 bp, Mus musculus
  source 1..458: mol_type = other DNA
gtaacccccaaccataaaattatttttgttgttatgtcataactgtaattttgctgctgatatgaaatgtaatgtaaatatctgtgttttccaatggtcttaggtgacctgtgtcaaagggtcatttgacctccgggtcatgaaaatcagggtgatatttcaagattttcaattttatggcattagagtaagtgttctacctgattcaatccattgttttgagtacactggagaaacttgaccattcacttaaaaaaaaaaaaaagtaacgttaattggcactttcttaaaaatgaattcaaatatatcagcatatgcagtcaactaatttgctgacttgaagacatgtaatgaacgactatatgcactaatcacaacatgcagtcggcatctaaaaaaatcatgatacagggatttttctttagactcaacacatttttcattcagaaacctgattg

SEQ ID NO: 54670 - DNA, 573 bp, Mus musculus
  source 1..573: mol_type = other DNA
ctttcttaatataagctagcccatcggtggatacagatatggagaaaatgtccccataggcttgcccactgggccgtctgatgaagacagtgactggtttaccctacacaagtaatataaaaacgtactttgtgtaatatgaaatatactacttagatgaaggctgtgaattccatggagtacactcacaacggttgccagagtcctaagtttaagtgcgtctacttaattatagcactttattccacaaataagcacaaatatcgcttgttcattaaaaaatcgaggccagcctggtctacacagtgagttccaggacagccagggctacacagagaaacggcttaccggccggccggcggagttaaaaaacaccgcctggcccgtagggcgcctccgagaaggggtggaccgacccgcccttaaacacaccgccccgcacgtaggggcggagaggctcgggcggctcgaggcctcggagcggaagggggtgggagcgatccgcccgacctgacgaccgttcctctcctcagcgcgagcttgcctcgtgctcccggaagtcccgcttgtaac

SEQ ID NO: 54671 - DNA, 478 bp, Mus musculus
  source 1..478: mol_type = other DNA
tttcgagacaggcaagttacctttcgaaggtggtctgaccatctgaagcattcgaggcgtttactgcagtagcaggagaagatgtaaacagttgattgaaagtgcctccagccagagtctccacgtcgtgaagacgggttccggcaggaagccaccagtgttgccttcccgcggtctgcacagtgcaccggctccagccggacccggacgccgtcctgtccccaagtcacctcgccgactgtcccgcgccgcgcggccccgagcgcgtcaacctgcagccgaactcactcggcagccgccggctccagccgaacccgggcgccgccctgcccccaagtctccgctccgacttgtcccgcgcggcgcggccgcgagcgcgtcgaaccgcccagccgaagtcgctcggctgcacccgcggtttttcacgcggggtcaccgctaacgtccggtcacagccggcgttctcgggcgccgttac

SEQ ID NO: 54672 - DNA, 619 bp, Mus musculus
  source 1..619: mol_type = other DNA
agagtcagtattagaaaatctacatgtgtcatattttaaactatatttcaaacatgagttaggccttcttccatctatagattttacctgaagatgtatttcttatcctcttaaatctatgaaaaagcttaggattttttttttacatgtaatcatgcaaattcacaaaccttatatttctcttttgaaccaatcaaataatgtgttaatatgtgaggtttactgccatagatataattatctgatatttcactgatcaaaaataaagtagtaagcactgcattgcaaagtaaataaacatcaagtgtttatattgtagtgtttacaggctcataaggttacttctttgaaaataatctcaaaattaattgccctgtttttaaaatcgcgagagacaaattatgatatcctagactttgattataaaatactagctgttaattctcagttacactaaaaggattttgataaagatgattttaattaaatcccacaaatcttaactaggttaagggcttcttagttaacttctttcaccaggaatgcaattcatgtttacctatataaggaaacctgttaggctgggagagggggagcgattcccagctggacagagcaa

SEQ ID NO: 54673 - DNA, 356 bp, Mus musculus
  source 1..356: mol_type = other DNA
aattggcccatggttttctttactgacagatcaagaaccaataaataaaatgatggagtgactaaggctgttttgtattttgtaatccattagacaatttttcattaataattgttacataaatcttacttttaagatgtagttttatttttattcacatgtatgtatatatgtatgcttgtatgtatgcatgtatatgtgtgtatggctgttgtgagcagcccaacattggtgctgggaactgaacttgtgactttcaaagagcagtaatcattgttactgagccatctcttcagaaaatatttgtttttaaaagcatccatttattgtcatgtggtgggtgtgaataaaaataa

SEQ ID NO: 54674 - DNA, 267 bp, Mus musculus
  source 1..267: mol_type = other DNA
ttctaaaataactaacaaagtgacagttgactatatattgggaatactttacactctttattattacaaaaagatgtggccccaagactaggttcttagcacaaagagattcatttggcccagagaggccaaagtctagcctctggacagattgatttcaggacttaaatattattaatgtaatttcatgttttaaaaattttttatttatttattttttatttttgctcaaggcttgccttagccatgtaggccatgctctgaatt

SEQ ID NO: 54675 - DNA, 404 bp, Mus musculus
  source 1..404: mol_type = other DNA
gtttaaatgatgtactgaaaaggtaaggctctcttttaaaaaataaaaaagtctgtagcatacttcctttaagttatatagagatttgaatttctagtataaatataatttaataacttaagtgatataaggtaaacttttgtttgagattctttaatattttaaaggcctgtttttaaaaaaatactttttataaaaattaatattcctgagtatgtttggtgataaatttattgcgttaaaaacatgtagtcataatacattaccaaggactctttttggtccagcccaatataggcagatctctttctcttcaggaaggaaacatgagcagagcttctggcagccacagaagggagccaaggctcacctgcatgcctcgagagggccgctactgcagaagt

SEQ ID NO: 54676 - DNA, 523 bp, Mus musculus
  source 1..523: mol_type = other DNA
gactccatctcagagctaaatcattattttatctgttattatttactaatactgcaaaaacttaatatatatattggattatcctcaaactgtgagcacttgtttgggaatatatatatattgtatatatatattttttgtatatatatataaattagtgagcttaccagtttagcactgataaacatacacttatgtaaaaagaagtttcattaactaaatttctgtattcattgttctaattaggagattatctgaaattcaccatcgatgaagattcaatcagttagagtgatacttacagcccttcactgtttttacaaaactaggtatctagaacaagatacactttaaaaaatatctttgaaatcattcttcacctttaaaatgctttaatgcttttaaggggctcttaaagtgcagcccctttccagtcatttgactcctgaaagctgccctaatcctggtaaaggcagcctctcctgcaggcgaggctctccgcgaccggagcccgccgcctacg

SEQ ID NO: 54677 - DNA, 269 bp, Mus musculus
  source 1..269: mol_type = other DNA
atactgtgatcttctcatgtagagcgtatcacaaacactgtgtgcgatagaatcagctggggatctttcccaggaaaactctagatgtctgggcacatcctctggagctgccattggcagagccacagtaatttccagcatttcaaatatcaatctcgctttaatctttaagtcttctcctctgtcaccaccgggtggcgacatctacgagtttacctccaaaacggcttgcttcggaaatgagctcagcacctcagttttaaagaaaa

SEQ ID NO: 54678 - DNA, 497 bp, Mus musculus
  source 1..497: mol_type = other DNA
tatgatcaagactgaagtggctacatgaatcttataaatctaggccaatcaaagaattttaccttttatagctataattttaaggtaaaaaagcacttttagagaattttctaggaaaagaacaactatcagcttctttgccttacaactaagaaactgcagactcccttttttaaaaaatagtttttcagcaggagcatccttgctgtgagtcactcttggctacagtgcagggcaagttaaatcagcctctgctgtgttaattgacaaatcaagataaagttttaaccatttttctttttcaacatggaacataaaacaatcattaatctaagagtgtctccttagaggacagagagaaagctggatgtctccatatttccctgtatccctgggagagaacaaaatgggcttaataatttttatgtggcacacttaattgattttagatgatatgaacctgttttaaccaggatcatcttggcagttggtcctag

SEQ ID NO: 54679 - DNA, 291 bp, Mus musculus
  source 1..291: mol_type = other DNA
gttttctgatcaaagtccaaagtttactttttgaatctgaatttaaaaagtggaactctggaagacaggttcagcctctcatatagggcagagcaggtctgagccagcctgctcaaagctgggggaggcgtctcctgtgagaccgtagcagaattcctgggaggtcttcatatgcggctcttcagagaggcagactcgctgacggaagactgtggggtcttcagagggcagaccagctaatgatcttctttaatagactaaatgttttaaaatatttcttcattctaaatc

SEQ ID NO: 54680 - DNA, 615 bp, Mus musculus
  source 1..615: mol_type = other DNA
tttcctaacttgggaaaacttttactgtatcaaagttgtatgatacagtatttgtttcattagtctataataccaagggcttaaatttcaggcaatgtccttgcctaaacttaaaaagcccttaaaaattggtgtttgactcttagtttctcactgacatcaactatagtttacagggacagactattgtacagtgagctcatcagaccttaaaagatatagacatctaaattacaaaataaaattataattaatcatctccttatgatactttatagaacaataaataagtatattttttcaacttccctagcctctataaaataaagaaatactaactgaataataaaaaagaatggatgtttttccgggagaagctcctgactgtgccagtccttctccatgaatttttatctgaaatctatcatctggcagtggtggcacacgcctttaatcccagcacttgggaggcaaaggcaggcctgagttcaaggctagcctggtcaataaataaaaaagcgttttccagcagattttgaggagctagattgtcccagagaacgagcattaaagcgctggcgtcataaatgattcatgattggcgtggatcatgct

SEQ ID NO: 54681 - DNA, 392 bp, Mus musculus
  source 1..392: mol_type = other DNA
ttttcatgtagtaaaagatttacttaccagtacttgtgcatgtaaataacatacctattctccatacagtatgtccggtatgaaatcctgcctcccaagtgctgggatggaagatattgttgtgaaatttaatcttgaatatgtataaatattataataaatgtatgcatagcaagtacagtgttaaataatgtgcatggaaatactggggcactagaattatagtcacctgcgcaggcgctcgcgtgcagtgatatctttaaaagaaaaaagatccggctaagtatttatctaagcagtcggtttttttttcttttttaaatacagtttaatgaagaagataaattagtttgtgacgacttccagatttataaataacgcttgaaaaataa

SEQ ID NO: 54682 - DNA, 307 bp, Mus musculus
  source 1..307: mol_type = other DNA
ctcgctcgctcgctcggtcttaaacgatgtaaataacttctaccgtgttgcattcagtcaatctagatgtattaaactaaattatcatctgagcaaataaattagggttagggttagtaaaagaaatcagaaagtaatctgatcgctcacattaaaattcaagtgtctgagacactaatggatacctttaatcccgccccgtagttgggggtgagcctgcactaatagttatgaagtccatggcaagtagctgttgaactttatatattgttttttagtaagtttcgtacaactcaatatacaaagt

SEQ ID NO: 54683 - DNA, 394 bp, Mus musculus
  source 1..394: mol_type = other DNA
gaacagcaaaattggaacttgtcttattatattttttattattgtattatatataaatgaatgctcctcttacaaagtgttggatcatatttacaaattttagctacaacaacctgcccccgcagggataacctttgtgagggactgttcattcactatgatctgttgtttaaggacaaagtcatgtgacttttataaagttaacttcaagatcttaattttaaagtttgctagaattagtattaaggagcaccgattctgggaacttaacagaaggtgttctgtaaggcaagaggaaaatttttttttttaacccctaaaaaccgatgctcttaggctgacatcacgagctagcgaagtagcaagtttagctgcactggtgtcttccattgga

SEQ ID NO: 54684 - DNA, 532 bp, Mus musculus
  source 1..532: mol_type = other DNA
gggatgatacaaaatttgcattaatctccagttttgttagaaaggagaaagtacttgtcatagctgttgatttctttatagtaaagtcatatgaaattaatttcctcctcgtacaaagtgaaaagggttgaggcattaaaactatgtatattttctattttctaaacagacaattctgttacatgtgcttcaaacatttataattctttgtgtaaccaagaaaattattcacgtataatttttattgttttctcagccaaaagaaatctccttgttttcactaatagaactaggaaaccttaccttttattttttgtgaagcttccaaaaattagtaaggttatattagtaaaggctaattttagtaaaatttctattctcgcacctgaaaaggaaatagaacttaagatccttcaactgaagaaagttccaagtttttaaatcccgttacttaaactctagttaaagaagaatcgtgcgtcttgcgtgatgacgcaaactcgtcatatccaaaactgtgtacgtaagctct

SEQ ID NO: 54685 - DNA, 511 bp, Mus musculus
  source 1..511: mol_type = other DNA
tgttacactaatatatctccatcatatatgtcatatacacacatgtatatacacacacacacatatatatacatcaactaacacacatatatcttatatatatatatattttttgtaggatattgtttgcaataatatctcaattaaaaattcctttttccaagttgatcacttagacaaaattgaagaaacatcctatttgttcaaagaagttattctctttatctctggcaaaagggacacacagttctccattaacgtatgactattacatgagtatcattcccatgtacttcccaagaacagacagccttggtgttttggaaatcaaggcctcgcttcttaccagtgtgtttttaaatttaaaattgtgtaactcggagagtactccatcaagaaattttataaagcactttaaaaagacagaaaaaagttcatctaagcacctttttttcctgagcttactaggaacttaagaaaatatattaggtactggaggggcctctttgag

SEQ ID NO: 54686 - DNA, 579 bp, Mus musculus
  source 1..579: mol_type = other DNA
tgtcacagtacattgtacttcagttaaacacaaatatattatacaagaacaaaaatataaggatctagttaattcaagatataatatccaatgtcacctgatgagaaataaaatatgaagtttagaagctcttaaattaaaaactagtgtgatagatttcaataatgtaagcaaatctccacttcctgtcaataagtgacaaaaaagtccatctcttttaaactaggaatttaaaaataaggcagtcttagatgcgaaattgttatggaatacaattacttgtagattattctcatatcagtgtactcaaaatactttgagtagtggttaggtataatatttaaaatacaatcagaatttcagcatggtctaatttatttatcttccaggtttaagtaaagcctcctactttcaaggagactttgtaattctagtactagaaaatgtatgaaagtgacactttttgatgaataacggatatctgagattctcaggcagtctaatctggactcccttcaagctcaaagtggtcagaccaatcaagtggcccaccattgttctgacaatgatataaccagg

SEQ ID NO: 54687 - DNA, 343 bp, Mus musculus
  source 1..343: mol_type = other DNA
gttaacaagcgaaatcaagttgagcactttcaatttgtaatctttaaatacgaatcatccatgtatatatattttttccttttataatgttggaaaactcaattctacacaatgtggcccgcccagtattttatcaatattttgggtaagtagtagaaattttataatggcttttaaataaaagattaatttaccgtatttcatgtatatgagtatggtttttattcgctaggtaagaaaagaattagtaaacatatgttggtcttttaaatgttttaaatggacaacagcgatgtatcccgggctcagagcttgcaataggaggcctctgcaggtagctgcc

SEQ ID NO: 54688 - DNA, 349 bp, Mus musculus
  source 1..349: mol_type = other DNA
acatggactggttaacaagccctgaaatcaagttgagcactttcaatttgtaatctttaaatacgaatcatccatgtatatatattttttccttttataatgttggaaaactcaattctacacaatgtggcccgcccagtattttatcaatattttgggtaagtagtagaaattttataatggcttttaaataaaagattaatttaccgtgtttcatgtatatatggtttttattcgctaggtaagaaaagaagtaaacatatgttggtcttttaaatgttttaaatggacaacagcgatgtatcccgggctcagagcttgcaataggaggcctctgcaggtagctgcc

SEQ ID NO: 54689 - DNA, 503 bp, Mus musculus
  source 1..503: mol_type = other DNA
gttttgcatatatgcaataatggagcaaagccattgatattgtgaataatgaaaaaaaaatagtatatccaatactagttgatattacagcatctggaaagttttatgttataccattacttaaatgtgatacagactttagaagatgatgggacattacctaattaattattactatgagaaataatcttgtaaaggcaatttacattaaaagggtaaaagttataaataaatctcagtgaagctcttattataaaatgttcatttagagccctttgttataatagatccaaatagttaagattaacatgaaactcatctaaagtatgaaatgaattgatttttcaacattcaaggaaaattccagaaaaaataaatcggttttaaccgaaaaggcttccttttctaacatactattcctttttcaggccttaaaagcacaaaaagaaagtctataggcaggcctgctttatacatgatacgaagcagctcctgcgttggct

SEQ ID NO: 54690 - DNA, 434 bp, Mus musculus
  source 1..434: mol_type = other DNA
attgtggctcataactgcacaatcacagtttcagagaaacagtgctctcttgcagcgtctgtaggcaacactgctcccctgagagagagagggcctgcactgcctagcacactcttctatcaaggaaatctgcatgttcccttctgaactcttagggcagcatagactcttctggtgtgcgtgtgtacatgcagaagtccacattattaaatgtttatgcacataaataaataaaaaacctgaaattaagtagagccatttgctgtatttcatatgttacatatttgttctggattttcaagtttgtaagcacttgtcaaccaacaaactggaaatcatttgtcttaaagccagtagactgtagtgaacgcatgcgcagggtgtattcgtgagacctatttgctccagctggcatcacaaaggatcctctgagg

SEQ ID NO: 54691 - DNA, 393 bp, Mus musculus
  source 1..393: mol_type = other DNA
ttgcacaatcacagtttcagagaaacagtgctctcttgcagcgtctgtaggcaacatgctcgcctagccccctggcctaactcctgagagagagagggcctgcactgcctagcacactcttctatcaaggaaatctgcatgttcccttgtgcgtgtgtacatgcagaagtccacattattaaatgtttatgcacataaataaataaaaaacctgaaattaagtagagccatttgctgtatttcatatgttacatatttgttctggattttcaagtttgtaagcacttgtcaaccaacaaactggaaatcatttgtcttaaagccagtagactgtagtgaacgcatgcgcagggtgtattcagctggcatcacaaaggatcctctgaggcttct

SEQ ID NO: 54692 - DNA, 729 bp, Mus musculus
  source 1..729: mol_type = other DNA
tattccttttaactttcatatagaattatttttgctcacataaatgttttagtattagttatacatttagtgttttattgttagactaccatgcatgttgcatggcagtaacaacaaaaataaacagaattgttatactaatgttttccttttacatttgtagaatagttgtcaaaaagaacaacaccatggacgtatgttgcacatggtccataaaatgaccttaggaatctaaatatgttttaataatcataaagtttaactacttattattttgaattatttctgactgaagtgactgctattatacataaaatcctaatggctttgtaggaattattaaagttatgaaataataaaatgggaatttgacctcagatgtacctcatactttaataacactataattatcctgctttattaaacataactctaatttggggaccaagaactaagatatgctttttggtgtagatggtgaactgagaaaaaaaaatgtctatgtttaaaagagccatcgtctactttcccatcttcagaaaaatgaagcatgaaaaattttcacttgctggttatatatatatatatatataaaacaaagaaaaaaatatctacctttttttgtctcctatgaaacagagttttaaagtttctttaatcctttttattctgatgattctgagaaggaagttaatcccagtatgtgattaccttaagagtcaaaagaga

SEQ ID NO: 54693 - DNA, 371 bp, Mus musculus
  source 1..371: mol_type = other DNA
gcctagcaccctgccgtgagagggcctgcactgcctagcacactcttctatcaagctgcaaactcttaggggcagcatagactcttctgctgtgcatgtgtacaggcagaagtccacattattaaatgtttatgcacataaataaataaaaaacgaaattaagtagagccatttgcttatttcatatgttacatatttgttctggattttcaagtctgtaagcacttgtcaaactggaaatcatttgtcttaaagccagcttggtattccgtgaacgcatgcgcagggtgtattcagccaatcagcacgtcctttggtgagacctgtttgctccagctggcatcacaaaggatcctctgaggcttctgtcc

SEQ ID NO: 54694 - DNA, 681 bp, Mus musculus
  source 1..681: mol_type = other DNA
gtgacacacacactgggccgcctgccctggtgctgtgtttgcattttattatcagcctcacacagttacgagtttggggctggggttcatgagcctcagggccccaggcagggacccgcccaggcctgtaatcccagggagggggatgactgagatggcaggccggcctgtgctggcagggcgggaaccaagcccttccccagcccgggggctgcctggccgcctgcgtcgccatggcgacagggaggagacacagagccgctcccgccaggggcggggtcaccgcggcctcccgagtcccgcggggtgacgtcacgcgggccccgggctcccgattggccgccgccgccgcccgtctctcgcggccgccgccccggccccgccccccgcgcaggcgccgcggccgtccctgcacactcgctcctgggatcgccatgtgctcgcagctccgcggacgtccccggctccccgccgtctccccgcgatcggactcggcctccgccgcccgcgcacggccccgccggctcccctccgcctccccgggcctccgccgccgccgcctcggcctccccggccttccccgcgcgggcgggcgggcgggcgggagcagcggaccgcgcctgccgccatgagaggtgagtgcggccccgggccgcgtcccgcccgagctcccgcacaggc

SEQ ID NO: 54695 - DNA, 566 bp, Mus musculus
  source 1..566: mol_type = other DNA
gtcacgcgggccccgggctcccgattggccgccgccgccgcccgtctctcgcggccgccgccccggccccgccccccgcgcaggcgccgcggccgtccctgcacactcgctcctgggatcgccatgtgctcgcagctccgcggacgtccccggctccccgccgtctccccgcgatcggactcggcctccgccgcccgcgcacggccccgccggctcccctccgcctccccgggcctccgccgccgccgcctcggcctccccggccttccccgcgcgggcgggcgggcgggcgggagcagcggaccgcgcctgccgccatgagaggtgagtgcggccccgggccgcgtcccgcccgagctcccgcacaggctcggccgcgcacggacggggcttgctcggcccgcagccgcctccagggtccccggttcccgccgccgccgccgccgccgcgtgacgtgaggcccgcccgcgcgcccgcccgggatccccagccgccaccgcgcccgcccgcccggggccccggctgcagaaccgtgacttcctgtctgcggcgggaagagaaggct

SEQ ID NO: 54696 - DNA, 432 bp, Cytomegalovirus
  source 1..432: mol_type = other DNA
cggggtcattagttcatagcccatatatggagttccgcgttacataacttacggtaaatggcccgcctggctgaccgccctgacgtcaataatgacgtatgttcccatagtaacgccaatagggactttccattgacgtcaatgggtggagtatttacggtaaactgcccacttggcagtacatcaccccctattgacgtcaatgacggtaaatggcccgcctggcattatgcccagacttggcagtacatctacgtattagtcatcgctattaccatgactcacggggatttccaagtctccaccccattgacgtcaatgggagtttgttttggcaccaaaatcaacgggccccattgacgcaaatgggcggtaggcgtgtacggtgggaggtctatataagcagagctcgtttagtgaaccgccaccatg

SEQ ID NO: 54697 - DNA, 373 bp, Cytomegalovirus
  source 1..373: mol_type = other DNA
cggggtcattagttcatagcccatatatggagttccgcgttacataacttacggtaaatggcccgcctggctgaccgccctgacgtcaataatgacgtatgttcccatagtaacgccaatagggactttccattgacgtcaatgggtggagtatttacggtaaactgcccacttggcagtacatcaccccctattgacgtcaatgacggtaaatggcccgcctggcattatgcccagacttggcagtacatctacgtattagtcatcgctattaccatgactcacggggatttccaagtctccaccccattgacgtcaatgggagtttgttttggcaccaaaatcaacgggccccattgacgcaaatgggcgg

SEQ ID NO: 54698 - DNA, 362 bp, Mus musculus
  source 1..362: mol_type = other DNA
tagcgctgcaggaaatgcttctgcattgcatacccagagttacatatatacctggatgctacatatataggagatgtctccccgggaacactgcaggaaggagaatttctacattttcgttactacaggtccggaccctcaggactgcgcatcccccgcccccatcagagggggaggggaagaggttgcggcgcggcgcatgcgcactgtcggattcgcctccgctgccggcgcgcagcgtccatgctgccgtgagtccagtcggaccgcaccacgagggcgcgaccatacgctctgcggcggtaggcgtgtacggtgggaggtctatataagcagagctcgtttagtgaaccgccaccatg

SEQ ID NO: 54699 - DNA, 1039 bp, Mus musculus
  source 1..1039: mol_type = other DNA
atgtagactaaatatgtgcatgtggaggaggctgaaaacacatcagagctagcgctgcaggaaatgcttctgcattgcatacccagagtttccttgctcatctgggagtctgtgtttttcctagatgtgtgcacttgtgtgagattctctgggtgtgagtcaaagtgttatctgaatgtgtaatgtgtgctcaatatgctcatgtgtgttaccctgagcttctgtgtctacatatatacctggatgcctgtgtgttctgtgatgtacatatatattctgtctttccttccttttctatttgtgttattccatgtgttctttcagattctcaccaccaagggcaaggatatgttaactacccaagtgtccacctccgcctgtctggtgatgtttacgccacccccgtgctcttttctttgcccgacagagttgttataggagatgtctccccgggaacactgcaggaaggagaatttctacatttatgttcccctctgagtgtgcttctatccccaaaatgccttcaaaggtgaaaatcaacactggaaacccaagtatctgggaagggcaagagtgtgtaagtgcaagttagcctaaggaataggaagaggttggtaaacagggtaggatcgtgggagggagtttcgttactacaggtccggaccctcaggacaagaaccccacccccactccccaaattgcgcatcccccgcccccatcagagggggaggggaagaggttgcggcgcggcgcatgcgcactgtcggattcagcaccgcggtcagagccttcgcctccgctgccggcgcgcaccaccacctccccagcaccaaaggctgactgacgtcactcactagccctccccaaactccccttcctcgccgccttggtcgcgtccatgctgccgtgagtccagtcggaccgcaccacgagaggtgcaagatagggaggtgcgggcgcgaccatacgctctgcggcggtaggcgtgtacggtgggaggtctatataagcagagctcgtttagtgaaccgccaccatg

SEQ ID NO: 54700 - DNA, 567 bp, Cytomegalovirus
  source 1..567: mol_type = other DNA
cggggtcattagttcatagcccatatatggagttccgcgttacataacttacggtaaatggcccgcctggctgaccgcccaacgacccccgcccattgacgtcaataatgacgtatgttcccatagtaacgccaatagggactttccattgacgtcaatgggtggagtatttacggtaaactgcccacttggcagtacatcaagtgtatcatatgccaagtacgccccctattgacgtcaatgacggtaaatggcccgcctggcattatgcccagtacatgaccttatgggactttcctacttggcagtacatctacgtattagtcatcgctattaccatgctgatgcggttttggcagtacatcaatgggcgtggatagcggtttgactcacggggatttccaagtctccaccccattgacgtcaatgggagtttgttttggcaccaaaatcaacgggactttccaaaatgtcgtaacaactccgccccattgacgcaaatgggcggtaggcgtgtacggtgggaggtctatataagcagagctcgtttagtgaaccgccaccatg

SEQ ID NO: 54701 - DNA, 455 bp, Homo sapiens
  source 1..455: mol_type = other DNA
aaaagccaggccgtttacccccttcatggagggtagggtaataaccctttaaaaacagagatgccccggtcacagggcagaaggaggagagggctggcattcttcccaccggcccgcgtgactgtagcaccggggtgcagcgaagcgagctctctcccatcccaggcaggggtgggggagcagcaggaaagccttgcccagcccctccacctagagggaatgggagggaggggtcccggtcccgcgtagacagctgcgctcccgccgcgcgccggggttgggttcaggtctggtcacatgacctggcctgaggtgctcgcggcccccaccccaccagtgggcgtcccccccacgcgtggtcgaccatcattggtcggtggaacccagcgttccgagtaggcgtgtacggtgggaggtctatataagcagagctcgtttagtgaaccgccaccatg

SEQ ID NO: 54702 - DNA, 491 bp, Homo sapiens
  source 1..491: mol_type = other DNA
gccgcgggctgaattacttccacgcccctggctgcagtacgtgattcttgatcccgagcgctggggccgccgcgtgcgaatctggtggcaccttcgcctagccatttaaaatttttgattggggccgcgggcggcgacggggcccgtgcgtcccagcgcacatgttcggcgaggcggggcctgcgagcgcggccaccgagaatcggcaagctggccggcctgctctggtgcctggcctcgcgccgccgtgtatcgccccgccctgggcggcaaggctggcccggtcggcaccagggagcggaaagatggccgcttcccggccctgctgcagggagctgtcacccacacaaaggaaaagggccttgtcgcttcatgtgactccacggagtaccgggcgccgtccaggcacctcgacccacactgagtgggtggtaggcgtgtacggtgggaggtctatataagcagagctcgtttagtgaaccgccaccatg

SEQ ID NO: 54703 - DNA, 427 bp, Homo sapiens
  source 1..427: mol_type = other DNA
agacacgaccgcgtcctgaggcggttctgctgcctcccgacagttgccgtagggaaggtgctgggaggcctgccgagctaacccgccccaccccgcggcggcctggcggctccctccaatcccaatcctggggggccgtgagcgagcagccctagtggcacccccggccaagatcccggctagcgccgctatccgccccctccctcccgcggaagctgggggcgcatgcgtagaggtggacgctcccctcccccgcccggggtaactgaggactcccgcgcgcggactcgctgcgccccaccctccctttccccggggccgtccggagagcgggggcgagcttgaaagtaggggcgggccccttctggtaggcgtgtacggtgggaggtctatataagcagagctcgtttagtgaaccgccaccatg

SEQ ID NO: 54704 - DNA, 457 bp, Homo sapiens
  source 1..457: mol_type = other DNA
gttgcagtgagccgagatcagcccactgcactccagttaataattgaggctgcaggaagccatgatcacgccactgccctccagcctgggtgacagagtgagaccctgctgacagttcttggaatgtacatttgactgcaaggcctgagaggccaaggcttcactgtgcagactgactgactgctaggcattttcttcctttccaggtttcatggatgaggcctgactcaggctcatggctccgaccccggcttctgtggagcagtctgccggtcggttgtctggctgcgcgcgccacccgggcctctccagtgccccgcctggctcggcatccacccccagcccgactcacacgtgggttcccgcacgtccgccggccccccccgctgacgtcagcataggcgtgtacggtgggaggtctatataagcagagctcgtttagtgaaccgccaccatg

SEQ ID NO: 54705 - DNA, 345 bp, Homo sapiens
  source 1..345: mol_type = other DNA
ttgtttgatatgttgaggcttaaaaaaaaaagatcttcagaacgccccaatgcccgcggggtgctggggtgcctcttctttcatcagagtcggcccaccctccgagctcttcagacagagctgaaaaactcattcgagccggctaaccgctaagggctgccgacgccattttgcagggtgggctgcgcagactcttggcacgcgtgcgcacaggcggtacgagtgcgcgtgctcggtgggagcccgcggagtacgcttcggagcacgcgcgcggaggcaagcgctctaggcgtgtacggtgggaggtctatataagcagagctcgtttagtgaaccgccaccatg

SEQ ID NO: 54706 - DNA, 458 bp, Homo sapiens
  source 1..458: mol_type = other DNA
tgctgtaagaaaagttccaacaataccagtctccgagggtgcgccagagcagacgggccgggagaatgctgccccggaacccataaatctgggccctgcccaggtaggccgggacagctggggtggcctgggccgccccatctggcagcccaacttggcggcaacaggtggcccggcgcccgggggtctgggaggaaagtcgctccgggggcgggccccgttgccccgccgcgtccccattcgaaagggcaacctgcccgcgcgttccgccgccgccgccgcgcttcctcctgaaggtgactgcgcccgcggggacgcagggggcggggcccgggtcgcccggagccgggattgggcagagggcggggcggcggagggattgcggcggcccgcagcgggtaggcgtgtacggtgggaggtctatataagcagagctcgtttagtgaaccgccaccatg

SEQ ID NO: 54707 - DNA, 303 bp, Homo sapiens
  source 1..303: mol_type = other DNA
tttattattttatttgctgcccaggctggagtgcagtggcgcgatctactgcaaagggattctccccgagtaactcagtccagcctggactaagtccttccggagttggcacagttttaaagtttatttttaacattttaatactctactttttaaattgcccatccacgatgtggaacaggcggagctcgagctatgccacataaagcctttttaaacacttgaatgtgcttgtttcagagtgtaggcgtgtacggtgggaggtctatataagcagagctcgtttagtgaaccgccaccatg

SEQ ID NO: 54708 - DNA, 464 bp, Homo sapiens
  source 1..464: mol_type = other DNA
tctgaaatgtgtttttaaatctccttttcaaaaagcccttaggactgttccataaagttgatggcttagatctaaaattggggcctactttgcccttttaacagctaatgactgaaatactatttgcttccagcgtttggttcaggttgcgggaggccgactcgcgcccgcccctcggcaggccctcgcagccatgcgccgcacactgcagtactggcgcgcgttgcccgcaggcgcggcagaccccaccccgcggccgcgcgaggggagggggctcggggctcggagcccgcctctgcggcggccaggccgggcgcggagtgggcgcgcggggccggaggaggggccagcgaccgcggcaccgcctgtgcccgcccgcccctccgcagccgctacttaagaggctaggcgtgtacggtgggaggtctatataagcagagctcgtttagtgaaccgccaccatg

SEQ ID NO: 54709 - DNA, 448 bp, Homo sapiens
  source 1..448: mol_type = other DNA
ccttggccaggctggtcttgacaggcgtgagcctccgcgcccggccaggggcgcgcgtttttaatatcgggtgccacgccgtcccgcttctgaggcgcggcggcccactttggcaggccgaggcgggagatcgcgccattgcactccagctcccgccggaattcaggacggcgcgcctgtgcggcgcacgcgcgctcagttacttagcaacctcggcgctaagccacccgcgctgcaaggaagtttccagagctttcgaggaaggtttcttcaactctcatctgataattttcttatattttcctaaagaaggaagagactgcctctcgggaggttgggcgcggcgaactacttgggtgataagtgacgcaacactcgttgcataaatttaggcgtgtacggtgggaggtctatataagcagagctcgtttagtgaaccgccaccatg

SEQ ID NO: 54710 - DNA, 534 bp, Homo sapiens
  source 1..534: mol_type = other DNA
aacgcggggttcgcgacccgaggggaccgcgggggctgaggggaggggccgcggagccgcggctaaggaacgcgggccgcccacccgctcccggtgcagcggcctccgcgccgggttttggcgcctcccgcgggcgcccccctcctcacggcgagcgctgccacgtcagacgaagggcgcagcgagcgtcctgatccttccgcccggacgctcaggacagcggcccgctgctcataagactcggccttagaaccccagtaaagtagtcccttctcggcgattctgcggagggatctccgccgggtgtggcacagctagttccgtcgcagccggggctgctgggctggccggggctttcgtggccgccgggccgctcggtgggacggaggctcccgagtctggcaagaacccaaggtcttgaggccttcgctaatgcgggcagtgcacccgtacctttgggagcgcgcgccctcgttaggcgtgtacggtgggaggtctatataagcagagctcgtttagtgaaccgccaccatg

SEQ ID NO: 54711 - DNA, 10 bp, unidentified
  source 1..10: mol_type = other DNA
ccwwwwwwgg

SEQ ID NO: 54712 - protein, 12 aa, unidentified
MGCIKSKGKDSA

SEQ ID NO: 54713 - DNA, 10 bp, synthetic construct
  source 1..10: mol_type = other DNA
cggttaaccg

SEQ ID NO: 54714 - DNA, 12 bp, synthetic construct
  source 1..12: mol_type = other DNA
ccggttaaccgg

SEQ ID NO: 54715 - DNA, 14 bp, synthetic construct
  source 1..14: mol_type = other DNA
tccggttaaccgga

SEQ ID NO: 54716 - DNA, 16 bp, synthetic construct
  source 1..16: mol_type = other DNA
atccggttaaccggat

SEQ ID NO: 54717 - DNA, 18 bp, synthetic construct
  source 1..18: mol_type = other DNA
aatccggttaaccggatt

SEQ ID NO: 54718 - DNA, 10 bp, synthetic construct
  source 1..10: mol_type = other DNA
acaaatttgt

SEQ ID NO: 54719 - DNA, 10 bp, synthetic construct
  source 1..10: mol_type = other DNA
gtgggcccac
